United States Patent Application Publication US 2026/0226491 A1, published August 6, 2026 (application 19/440,077).

The application's sequence listing, which the Patent Office published only in electronic form, follows.

SEQUENCE LISTING (612 sequences)

SEQ ID NO: 1 - protein, 711 aa, synthetic construct
  REGION 1..711: note = Description of sequence: Peptide, Named: NtHAP1a
MDQGFGSDSVPPAGSIDKSKVLDVKPMRCLMPVFPSPNGMSSVSTPQPSPFVCVPPSGPFPPGVSPFYPFLAPNGSGRSGENQESFGFGTPISPVPLNSFRTPTANGDTGPRRPGRPRATNVLAAEDDGVSDSQNQSDQFGSGYSVHVNDVEDTSTGKKRGRPRKTRMSHPANSHVEVDVDPILNQLLASFKLVDVDQVKKADGDKELVGRILLAFDVFRRRLTQIDEKRGETPGSARRPDLKAANLLMTRGARTNQTKRIGNVPGIEVGDIFFFRMELCLVGLHAPSMAGIDYMSVRLTGDEEPIAVSIVASGGYDDEGDDGDVLIYTGQGGVQRRDGQMFDQKLERGNLALEKSMHRGNEVRVIRGVIDVTNPRGKIYMYDGLYRIQESWAEKSKLGDCSIFRYKLLRVPGQPEAFTLWKSIQQWRDGTATRVGVILPDLTSGAESQPVCLVNDVDDEKGPAYFTYIPSLKYSKPYMKPNPSMGCQCVGGCQPGGSTCPCIQKNGGFLPFSSLGVLVSYKTLIHDCGSACSCPPNCRNRMSQAGPKARVEVFKTKNRGWGLRSWDPIRGGGFICEYAGEVVEESRVGELGNDGDDDYIFDATRMYEPLEPVRDYNDVSKKVPYPLVISAKKGGNVARFMNHSCSPNVFWQLVVRENNNETYYYIAFFAIRHIPPMQELTFDYGMVPPDKADRRRKKCLCGSLNCRGYFY

SEQ ID NO: 2 - protein, 711 aa, synthetic construct
  REGION 1..711: note = Description of sequence: Peptide, Named: NtHAP1b
MEQGFGSDSVPPAGSIDKSKVLDVKPMRCLMPVFPSPNGMSSVSTPQPSPFVCVPPSGPFPTGVSPFYPFLAPNAAARSGENHEAFGFGTPISPVPLNSFRTPTANGDTGPRRPGRPRATNGLVAEDDGVSDSQNQSDQFGSGYSVHVNDVEDTSTGKKRGRPRKTRMSHPANSHVEVDVDPILNQLLASFKLVEFDQAKKADGDKELVGRILLAFDVFRRRLTQIDEKRGETPGSARRPDLKAANLLMTKGARTNQTKRVGNVPGIEVGDIFFFRMELCLVGLHAPSMAGIDYMSVRLTGDEEPIAVSIVASGGYDDEGDDGDVLIYTGQGGVQRRDGQMFDQKLERGNLALEKSMHRGNEVRVIRGVIDVTNPRGKIYMYDGLYRIQESWAEKSKLGDCSIFRYKLLRVPGQPEAFTLWKSIQQWRDGTATRVGVILPDLTSGAESQPVCLVNDVDDEKGPAYFTYIPSLKYSKPYMKPNPSMGCQCVGGCQPGGSACPCIQKNGGFLPFSSLGVLVSYKTLIHECGSACSCPPNCRNRMSQTGPKARVEVFKTKNRGWGLRSWDPIRGGGFMCEYAGEVVEESRVGELGNDGDDDYIFDATRMYEPLEPVRDYNDESKKVPYPLVISAKKGGNVARFMNHSCSPNVFWQLVVRENNNETYYHIAFFAIRHIPPMQELTFDYGMVPPDKADCRRKKCLCGSLNCRGYFY

SEQ ID NO: 3 - protein, 656 aa, synthetic construct
  REGION 1..656: note = Description of sequence: Peptide, Named: NtHAP2
MEQGLRSEGNNPPSIDKTRVLDVKPLRCLAPVFPSPNGMSSVSTPQPSPFVCVPPTGPFPPGVAPFYPFVAPNESGRPGESSQQTPSGVPNQGGPFGFAQPISPVPLNSFRTPTTANGNSGRSRRAVDDDDYSNSQDQNDQFASGFSVHVNNVEDSGTGKKRGRPKKPRRAQQAEGSTPLEVDVEPLLTQLLTSFKLVDFDQVKKADGDKELVGRVLLVFDLFRRRMTQIDESRDGSGSGRRPDLKASNMLMTKGVRTNQTKRIGNAPGIEVGDIFFFRMELCLVGLHAPTMAGIDYMSVKLTMDEEPLAVSIVSSGGYDDDGGDGDVLIYTGQGGVQRKDGQVFDQKLERGNLALEKSVHRANEVRVIRGVKDVAYPTGKIYIYDGLYKIQESWAEKNKVGCNVFKYKLLRVPGQPEAFKVWKSIQQWKDGVASRVGVILPDLTSGAESQPVCLVNDVDDEKGPAYFTYIPSLKYSKPFVMPRPSPSCHCVGGCQPGDSNCACIQSNGGFLPYSSLGVLLSYKALIHECGSACSCPPNCRNRMSQGGPKARLEVFKTKNRGWGLRSWDPIRGGGFICEYAGEVIDAGNYSDDNYIFDATRIYAPLEAERDYNDESRKVPFPLVISAKNGGNISRFMNHSCNPFLSPLDTFLPCKS

SEQ ID NO: 4 - DNA, 2136 bp, synthetic construct
  misc_feature 1..2136: note = Description of sequence: Oligionucleotide, Named: NtHAP1a
  source 1..2136: mol_type = other DNA
atggatcaaggctttggttcagactctgttccaccagcagggtccattgacaagtctaaggttttagatgttaagcctatgagatgtcttatgcctgtttttccatccccaaatggaatgtcatctgtttcaactcctcaaccctcaccttttgtgtgtgttcctccaagtggtcctttcccacctggggtttctccgttttatccatttttggccccaaatggatccggaagatcaggtgaaaatcaggaatcttttggttttgggacgcctatatctccagttcctttaaattcattcagaactccaactgcgaatggagacactgggccaaggaggcccggcagacctcgtgctacgaatgtcttagctgcagaagatgatggtgtctctgattcacagaatcagagcgaccaattcggcagtggctatagcgtgcacgttaatgatgtagaagacacaagtacaggaaaaaaaaggggaagaccgagaaagactaggatgagtcatccagctaactcccatgtcgaagtggatgtcgatccaatactaaatcagctgcttgcgtcctttaaacttgtcgatgtcgatcaggttaagaaagctgatggtgataaggagctagttgggcgaatactattggcatttgatgtgtttcgtagaaggttgacccagattgatgagaaaaggggtgagactccaggttctgcaagaaggccggacctaaaggctgctaatttgctgatgacaaggggagctcggacaaatcagacaaagaggattggaaatgtacctgggattgaagttggtgacatattcttcttcaggatggaattgtgcctagttggtttgcatgcacctagtatggctgggatagattatatgagtgtcagacttacaggggatgaagagcctattgctgttagcatagtggcctctggaggatatgatgatgaaggggatgatggggatgtgctaatttatactggccagggtggagttcagagacgagatggccaaatgtttgatcagaaacttgagaggggtaatcttgctttggaaaagagtatgcatcgcggaaatgaggtgagagtaattaggggtgttatagatgttacaaatccgagggggaagatttatatgtatgatggcctttacaggatccaggaatcatgggcagagaaaagcaaattgggcgactgcagcattttcaggtacaaattgcttagagtacctgggcagcctgaagcatttacattgtggaaatcaattcagcaatggagggatggaacagcgacacgtgttggagttatcctacctgacctaacatctggtgcagagagtcaacctgtttgtcttgtaaatgatgttgatgatgagaagggacctgcttatttcacatatatccctagtctgaagtactcaaaaccttatatgaagcctaatccatccatgggttgtcaatgtgttggcggatgccaacctggagggtccacttgcccttgcattcagaaaaacggaggctttttgccctttagttcacttggagttcttgtgagttacaaaaccttgatacatgactgtggttctgcctgttcatgccctccgaattgccgaaatcgaatgtctcaagcaggtcctaaagcgcgtgtggaggtcttcaaaacaaaaaatagaggttggggacttaggtcttgggatcccatacgtggaggtggctttatttgtgaatatgccggagaagtcgttgaagagtctagggtaggtgagcttggcaatgacggtgacgatgattatatatttgatgctacccgcatgtatgagccattggaacctgtgcgtgattataacgatgtatcgaaaaaggtcccgtatccccttgtaataagtgcaaaaaagggtggcaatgttgctcgttttatgaaccatagttgttcacctaacgtattctggcagcttgttgtacgtgaaaataacaatgagacatactactacattgccttttttgccattaggcatattcctcccatgcaagaattgacttttgattatggcatggttccaccagacaaagcagatcgtaggaggaagaagtgcttgtgtgggtcattgaactgcagaggttacttttactag

SEQ ID NO: 5 - DNA, 2136 bp, synthetic construct
  misc_feature 1..2136: note = Description of sequence: Oligionucleotide, Named: NtHAP1b
  source 1..2136: mol_type = other DNA
atggagcaaggctttggttcagactctgttccaccagcagggtccattgacaagtctaaggttttagatgtgaagcctatgagatgtcttatgcctgtttttccatccccaaatggaatgtcgtctgtttcaactcctcaaccctcaccttttgtgtgtgttcctccaagtggtcctttcccaactggggtttctccattttatccatttttggccccgaatgcggccgcaagatcaggtgaaaatcatgaagcttttggttttgggacgcctatatctcctgttcctttaaattcattcagaactccaactgcgaatggagacaccgggccaaggaggcccggcagacctcgcgctacgaatggcttagttgcagaagatgatggtgtcagtgattcacagaatcagagcgaccaattcggcagtggctatagcgtgcacgttaatgatgtagaagacacaagtacagggaaaaaaaggggaagaccgagaaagactaggatgagtcatccagctaattcccatgtcgaagtggatgtcgatccaatactaaatcagctgcttgcatcctttaaacttgtcgagttcgatcaagctaagaaagctgatggcgacaaggagctagttgggcgaatactattggcatttgatgtgtttcgtagaaggttgacccagattgatgagaaaaggggtgagactccaggttctgcaagaaggccggacctaaaggctgctaatttactgatgacaaagggagctcggacaaatcagacaaagagggttggaaatgtacctgggattgaagttggtgacatattcttcttcaggatggaattgtgtctagttggtttgcatgcacctagtatggctgggatagattatatgagtgtcagacttacaggggatgaagagcctattgctgttagcatagtggcctctggaggatatgatgatgaaggggatgatggggatgtgctaatttatactggccagggtggagtccagagaagggatggccaaatgtttgatcagaaacttgagaggggtaatcttgctttggaaaagagtatgcatcgcggcaatgaggtgagagtaattaggggtgttatagatgttacaaatccgagggggaagatttatatgtatgatggcctttacaggatccaggaatcatgggcagagaaaagcaaattgggtgactgcagcattttcaggtacaaattgcttagagtacctgggcagcctgaagcatttacattgtggaaatcaattcaacaatggagggatggaacagcgacacgtgttggagttatcctacctgacctaacatctggcgcagagagtcaacctgtttgtcttgtaaatgatgttgatgatgagaagggacctgcttatttcacatatatccctagtctgaagtactcaaaaccttatatgaagcctaatccgtctatgggttgtcaatgtgttggcggatgccaacctggagggtccgcttgcccttgcattcagaaaaacggaggctttttgccctttagttcacttggagttcttgtgagttacaaaaccttgatacatgagtgtggttctgcctgttcatgccctccgaattgccgaaatcgaatgtctcaaacaggtcctaaagcgcgtgtggaggtcttcaaaacaaaaaatagaggttggggacttaggtcttgggatcccatacgtggaggtggctttatgtgtgaatatgccggagaagtcgttgaagagtctagggtaggtgagcttggcaatgacggtgacgatgattatatatttgatgctacccgcatgtatgagccattggaacctgtgcgtgattataacgacgaatcgaaaaaagtcccgtatccccttgtaataagtgcaaaaaagggtggcaatgttgctcgttttatgaaccatagttgttcacctaacgtattctggcagcttgttgtacgtgaaaataacaatgagacatactaccacattgccttttttgccattaggcatattcctcccatgcaagaattgacttttgattatggcatggttccgccagacaaagcagactgtaggaggaagaagtgcttgtgtgggtcattgaactgcagaggttacttttactag

SEQ ID NO: 6 - DNA, 1971 bp, synthetic construct
  misc_feature 1..1971: note = Description of sequence: Oligionucleotide, Named: NtHAP2
  source 1..1971: mol_type = other DNA
atggaacaaggtttgcgttctgagggtaataatcctccgagcatcgataagactagggttttggatgtgaagcctttgagatgtcttgcacctgtttttccatccccaaatggaatgtcttctgtttcaactccacagccatcaccttttgtctgtgttcctcccactggtccgttcccccctggggttgctccattttacccctttgtggctccaaatgagtcgggaaggccaggtgaaagtagtcaacaaactccaagtggggtgccgaatcagggcggcccttttggttttgcgcagcctatatctcccgttcctttaaactcattcagaactccaacaactgcgaatggaaatagtgggaggtccaggagggctgtagacgatgatgattacagtaattcacaggatcagaatgaccaatttgccagtggatttagtgtgcacgtgaataatgttgaagattccggtactggaaaaaaaaggggaagaccgaaaaagcctcggagagctcagcaggctgaggggtcaacccctttggaagtggatgttgaacctttgttgactcagttgctcacgtcttttaaacttgttgacttcgatcaggtcaagaaagctgatggtgacaaggagctagtggggagggtactgttggtttttgacttgttcagaagaaggatgacccaaattgacgaatcgagggatgggtcaggttctggtagaagaccagacctaaaagcttctaatatgctgatgacaaagggagttcggacaaaccaaacaaagaggattggaaatgcacccgggattgaagttggtgacatcttcttcttcaggatggaattgtgcctagtgggattgcatgcgccaactatggctgggatagattatatgagtgtcaaactaacaatggacgaagaacctcttgcggtcagcatagtgtcctctggaggatatgatgatgatggaggtgatggcgatgtattaatttacactggccagggtggagtccagaggaaagacgggcaagtgtttgatcagaaacttgagaggggaaaccttgctctggaaaagagtgtgcatcgagccaatgaagtaagagtaattaggggtgttaaggatgtcgcatatccaaccgggaagatttatatttacgacggactttataagattcaggaatcatgggcagagaaaaacaaggtgggctgcaatgtattcaagtacaaacttctgagagtccctgggcagcccgaagcatttaaagtatggaagtcaattcagcaatggaaagatggcgtggcatcacgtgttggagtcatcctaccggacctgacgtctggtgcagaaagtcaaccagtttgtcttgttaatgatgtagatgacgagaaaggacctgcctatttcacatatattcctagtttgaagtactcaaaaccttttgtaatgcctagaccctctccgagttgtcactgcgttggcgggtgccaacctggtgactccaattgcgcttgtattcagagtaatggtggctttttgccttatagttcacttggagttcttttgagttacaaagccttgatacatgagtgtggttcggcctgttcatgccctcctaattgccgaaatcgaatgtctcaaggaggtcctaaagctcgtttggaggtcttcaagacaaaaaatagaggttggggactcagatcttgggatcctatacgtggaggtggtttcatttgtgaatatgctggagaagtcatagacgctggtaattacagtgacgacaattacatttttgatgcaacccgtatatatgcgccattggaagccgagcgtgattataatgacgagtctcggaaagtcccttttcccctggtcataagtgccaagaatggtggaaatatttctcgctttatgaaccatagttgtaacccattcctttcgccattagacacattcctcccatgcaagagttga

SEQ ID NO: 7 - DNA, 4386 bp, synthetic construct
  misc_feature 1..4386: note = Description of sequence: Oligionucleotide, Named: NtHAP1a
  source 1..4386: mol_type = other DNA
ggaccatggtacagagatgtattgataagctcgtggaacaatgaccgatcaagatcgaggtcagctgtgatcaagaccgaagcgagaaagagatcaagcgagatcgaaggaagcctgctaggtcgaataacagaaagccgagatatctgcgatcgggcaaggattgtagcggaaatatcggcacgtatcaaatcaagaccggacattgagccaatcatggaatttctttctataattagaattataccataaataagattcatctactatgtaaaagggtcctaattattttgtaatgatcatatattcacgcataatcaagcaatatactacatttttctcttaaagctctcttaatttctgttattcagtccatacctttttagcacaatctgttgttcgagggtgatttagctcgagggccacaattgtttatcacaccaatttgctttattttactgttaatttctagcgttaattctcatatttatcagtttgtgtcaagtgaaatcacatatccttaaaaccacttataagtttaattgttatccaattttaagggtaaacactatactagtttaacgagtacagtgatgataggtttgaaggagactatgttgcattatcacaagttttgttatttatcgtgaaatgtatttgatgattgccgtacattaatatcaataacttaattacctttttaatgaaatatatttgttatccgctatatactccatatataatcacacacactttccataagatataagtaattaattctcaaatttattatacaatattcatttttagggaaaacatttattagaatacatagttatatttttgtaccaaaaaaattacaagaatagcatttaactgaagggtaaaatggtcaattaatttgtgatgggtattttagtcttttaccttaggcttaggggcttcactcataatatagtatgatagagaagtcataaaaaagaacatttactgcctcattcgttataatttatatgacataatttgattcaaataatttaactcaatacaaaatttaagaaagaaatatatttttaaaatatgtagcgttaaatatgctataaaatgttgaaacttataatgataaatatatcataatatttacatgactataagattttttttgaaataaaatactatatatatatataaagttaaattattttcaaccacatttaaaaaatgtatcacataaaatgaaataaggaaagtgaggagtatatcactgtactttgtgttagcagccggcacgtgacaaagatactgtaagacacactcctaattttctctgtattcaaaatctcccacactgtaagcattgaagtatgccaaagctgtcaacttcacaacacactaaacgcaattcttcttgaaaagctctctgtgtggttcaaagatcgttttcccaaatttgcccaggtacttatccttttcaagatcgtttcgtttgactgaaaatgcttgaatttctgatccatttgagacttattttgtttctgataatttttcattattttttttgtaaattatttttctttttattgtcattatactatgaagggttcctattacaaaatcttgagttgggtttagcttattttgtccttttgcatgttgttttttctaaattttggtggaatttttgctgggtttctagggttagctccatttagggcttgttcctgttcatttcccttaaattgtgagtttttatttggattttcagtcaacgtagccattcttgagcagaaagtttgcatctttagcctttttattggtgcatgatgtcctagaattgtattttttttaatggttttcttacttttttttcttgctgtagtaattggagattgtgcatggatctaggtggtaacaggaaaaagtgcagagctttgtatttgggttattaatgtgagtgaaagctgtgatctttgttgttgtggctattgatttcgattgaaatggatcaaggctttggttcagactctgttccaccagcagggtccattgacaagtctaaggttttagatgttaagcctatgagatgtcttatgcctgtttttccatccccaaatggaatgtcatctgtttcaactcctcaaccctcaccttttgtgtgtgttcctccaagtggtcctttcccacctggggtttctccgttttatccatttttggccccaaatggatccggaagatcaggtgaaaatcaggaatcttttggttttgggacgcctatatctccagttcctttaaattcattcagaactccaactgcgaatggagacactgggccaaggaggcccggcagacctcgtgctacgaatgtcttagctgcagaagatgatggtgtctctgattcacagaatcagagcgaccaattcggcagtggctatagcgtgcacgttaatgatgtagaagacacaagtacaggaaaaaaaaggggaagaccgagaaagactaggatgagtcatccagctaactcccatgtcgaagtggatgtcgatccaatactaaatcagctgcttgcgtcctttaaacttgtcgatgtcgatcaggttaagaaagctgatggtgataaggagctagttgggcgaatactattggcatttgatgtgtttcgtagaaggttgacccagattgatgagaaaaggggtgagactccaggttctgcaagaaggccggacctaaaggctgctaatttgctgatgacaaggggagctcggacaaatcagacaaagaggattggaaatgtacctgggattgaagttggtgacatattcttcttcaggatggaattgtgcctagttggtttgcatgcacctagtatggctgggatagattatatgagtgtcagacttacaggggatgaagagcctattgctgttagcatagtggcctctggaggatatgatgatgaaggggatgatggggatgtgctaatttatactggccagggtggagttcagagacgagatggccaaatgtttgatcagaaacttgagaggggtaatcttgctttggaaaagagtatgcatcgcggaaatgaggtgagagtaattaggggtgttatagatgttacaaatccgagggggaagatttatatgtatgatggcctttacaggatccaggaatcatgggcagagaaaagcaaattgggcgactgcagcattttcaggtacaaattgcttagagtacctgggcagcctgaagcatttacattgtggaaatcaattcagcaatggagggatggaacagcgacacgtgttggagttatcctacctgacctaacatctggtgcagagagtcaacctgtttgtcttgtaaatgatgttgatgatgagaagggacctgcttatttcacatatatccctagtctgaagtactcaaaaccttatatgaagcctaatccatccatgggttgtcaatgtgttggcggatgccaacctggagggtccacttgcccttgcattcagaaaaacggaggctttttgccctttagttcacttggagttcttgtgagttacaaaaccttgatacatgactgtggttctgcctgttcatgccctccgaattgccgaaatcgaatgtctcaagcaggtcctaaagcgcgtgtggaggtcttcaaaacaaaaaatagaggttggggacttaggtcttgggatcccatacgtggaggtggctttatttgtgaatatgccggagaagtcgttgaagagtctagggtaggtgagcttggcaatgacggtgacgatgattatatatttgatgctacccgcatgtatgagccattggaacctgtgcgtgattataacgatgtatcgaaaaaggtcccgtatccccttgtaataagtgcaaaaaagggtggcaatgttgctcgttttatgaaccatagttgttcacctaacgtattctggcagcttgttgtacgtgaaaataacaatgagacatactactacattgccttttttgccattaggcatattcctcccatgcaagaattgacttttgattatggcatggttccaccagacaaagcagatcgtaggaggaagaagtgcttgtgtgggtcattgaactgcagaggttacttttactagttgtcatggtctgatgaaagaaatgaagttcactggtcaccactgaatcaaggtttggtttcctttttaaatttgaaaatatcttattttttttatttttctgctcgttttgagttttaatccatgtttgctagttatcatgtgaacataagttatgcagaaatctgaatagcattttagcagtctaaagttgctttatcttcattgagtttatgaattgaagtgtttctgaagatgacttttttctact

SEQ ID NO: 8 - DNA, 4386 bp, synthetic construct
  misc_feature 1..4386: note = Description of sequence: Oligionucleotide, Named: NtHAP1b
  source 1..4386: mol_type = other DNA
tcatttcaaaatatcttgtgggattgtgtttacatttcacgttaaaatagtaaattaattctctaaaaataattctaagttgaataaagttacgtagtagtagtttgtagaactttacctaatagttagaaatttaaagtcaactaatgatactagaacttattaaatttgaaagtcaatctgaatttcttctcttgagtttctcgacatgtatggtatttcaagttcttaaatctgtacaaaatattaataaagtttaaatcagagtctaattaagataaaactaaaaataaagttcttgatcttttgtttagatgtttcaacttctttgaacattttttagctttcttaagatcatcgaaaataaacacaaaggtgttaggctgataaaaaaatctttcttatttccttatggatttttatgttgtgaatttgcctctaaatgtaaaaattaattaatccgttttttttacacaatgcagtcttacttatcttctatgtataacataattgcatattttcagaaacacaaataaaaactattttaaagaaaatattctatatgacttccaagtatatcaaagaaacaccaccattactcccttataaaagttgtgtgagtttgctcctaaaagattcagatataatttattttcttttatataattctgtcttatttatgctttaatttacatgatgttttgaaagtataaaagaatttctctttaaaatgtgacatgcatatctttcaacatttaacttttaagtcttacaataatataaaatacgatgcaatgtacgtgcacaaagactataaattatagttttaaaaaattccaagtcatttaaatgtatatctactatctatattattagataaatgtgatgatgcaagtaaaaatattgatagactaaaataattattttcaatataaaggaatattgtattatctcgatgtcgattgctattacatataattgttgttacatataattcattcgtattttatattttaatactttttattgatagacgcaaaaaaatacgtgcaacgcgcgtaaattaaaactagtattataatatatgtatagttataatacttttgaaacttatcatgataaatatataccgtaacatttacatgactataagattttttttgttagaaataaaataaaatatatacaattattttcaaccacattaaaaatgtatcacataaaataaaataatagtataaactataaagttaaaattattatcactgtactttgtgttagcagccggcacgtgacaaagatactgcaagacacagtactaattttctttttattcaaaatctcacacgcaataagcatttaagtatgacaaagctgtcaacttcacaacacactaaacgcaatttttcttctaaagctctctgtgtgcttcaaagatcgttttcccaaatttgcccaggtacttatccatttcaagatcgtttcttttttgactgaaaatgtttgaatttctgatccatttgagacttattttgcttctggcaatttttctttaatttttttgtaaattatttttctttttattgtcattttactatgaagggttcctattacaaaatcttgagttgggtttagcttattttgtccttttgcatgttgttttttccttaattttggtggaattttttgctgggtttctagggttaactccattttagggcttgctcctgttcatttcccttaagttgtgagtttttttggattttcagtcaacatagccattcttgagcaatacatttgcatctttagccttttattggtgcatgatgtcctagaattgtatttttaatgggtttcttactttttttccttgctgtagtaattggagattgtgcatggatctaggtggtaactggaaaaagtgcagagctttgtatttgggttattaatgtgagtgaaagctgtggtctttgttgttgtggctattgattttgattgaaatggagcaaggctttggttcagactctgttccaccagcagggtccattgacaagtctaaggttttagatgtgaagcctatgagatgtcttatgcctgtttttccatccccaaatggaatgtcgtctgtttcaactcctcaaccctcaccttttgtgtgtgttcctccaagtggtcctttcccaactggggtttctccattttatccatttttggccccgaatgcggccgcaagatcaggtgaaaatcatgaagcttttggttttgggacgcctatatctcctgttcctttaaattcattcagaactccaactgcgaatggagacaccgggccaaggaggcccggcagacctcgcgctacgaatggcttagttgcagaagatgatggtgtcagtgattcacagaatcagagcgaccaattcggcagtggctatagcgtgcacgttaatgatgtagaagacacaagtacagggaaaaaaaggggaagaccgagaaagactaggatgagtcatccagctaattcccatgtcgaagtggatgtcgatccaatactaaatcagctgcttgcatcctttaaacttgtcgagttcgatcaagctaagaaagctgatggcgacaaggagctagttgggcgaatactattggcatttgatgtgtttcgtagaaggttgacccagattgatgagaaaaggggtgagactccaggttctgcaagaaggccggacctaaaggctgctaatttactgatgacaaagggagctcggacaaatcagacaaagagggttggaaatgtacctgggattgaagttggtgacatattcttcttcaggatggaattgtgtctagttggtttgcatgcacctagtatggctgggatagattatatgagtgtcagacttacaggggatgaagagcctattgctgttagcatagtggcctctggaggatatgatgatgaaggggatgatggggatgtgctaatttatactggccagggtggagtccagagaagggatggccaaatgtttgatcagaaacttgagaggggtaatcttgctttggaaaagagtatgcatcgcggcaatgaggtgagagtaattaggggtgttatagatgttacaaatccgagggggaagatttatatgtatgatggcctttacaggatccaggaatcatgggcagagaaaagcaaattgggtgactgcagcattttcaggtacaaattgcttagagtacctgggcagcctgaagcatttacattgtggaaatcaattcaacaatggagggatggaacagcgacacgtgttggagttatcctacctgacctaacatctggcgcagagagtcaacctgtttgtcttgtaaatgatgttgatgatgagaagggacctgcttatttcacatatatccctagtctgaagtactcaaaaccttatatgaagcctaatccgtctatgggttgtcaatgtgttggcggatgccaacctggagggtccgcttgcccttgcattcagaaaaacggaggctttttgccctttagttcacttggagttcttgtgagttacaaaaccttgatacatgagtgtggttctgcctgttcatgccctccgaattgccgaaatcgaatgtctcaaacaggtcctaaagcgcgtgtggaggtcttcaaaacaaaaaatagaggttggggacttaggtcttgggatcccatacgtggaggtggctttatgtgtgaatatgccggagaagtcgttgaagagtctagggtaggtgagcttggcaatgacggtgacgatgattatatatttgatgctacccgcatgtatgagccattggaacctgtgcgtgattataacgacgaatcgaaaaaagtcccgtatccccttgtaataagtgcaaaaaagggtggcaatgttgctcgttttatgaaccatagttgttcacctaacgtattctggcagcttgttgtacgtgaaaataacaatgagacatactaccacattgccttttttgccattaggcatattcctcccatgcaagaattgacttttgattatggcatggttccgccagacaaagcagactgtaggaggaagaagtgcttgtgtgggtcattgaactgcagaggttacttttactagttgtcatggtctgatgaaagaaatggagttcactggtcaccactgaatcaaggtttggtttcctttttaaatttgaaaatatcttgtttcttttatttttctcctcgttttgagttttaacccatgtttgctagttatcatgtgaacataagttatgcagaaatctgaatagcattttattgatacgagtctcgaacccttgatctagtggaagattttaaattagctgtctaaagttgctttatctccg

SEQ ID NO: 9 - DNA, 4221 bp, synthetic construct
  misc_feature 1..4221: note = Description of sequence: Oligionucleotide, Named: NtHAP2
  source 1..4221: mol_type = other DNA
aaaataattggacggagggtattacttaccaactccaataatttaaaggtagttttgatctttttcggtagtttataatattgtagtgaaaaatgattatagtaaagattttgagaaaaatgtattgggacttgggagtatttcaaaagttgaattctaagcgacatgactatataatagttgcaggaattaacgaccgacacttcctttataagggtgttgtttcacttcaaatttgagacattacaagataactgataataagcttgttatatcctaataaacaactgtttgtttttcgcaaaaattaggcaatcattcttttgagatggcaaatgataatatcacgcttcaagccttcattggtccttcgttggttttgcatatgcttgagatggcaaatgataaactgcctgagctctacagtgtcaaccttagaaccgtctcatgatatattataaaattaataataaaatatattttaaaaatagtctagtatgcataagtaacacttcaatatttgaccggtcattaatgacaatagattacaacaaatgatcattagcttaatccctaatgttgaattatttagtcaatacttgttttgacactagtaaagacagtaaaagaaatatactaagagcatcaatatcatataagaagtattaagtggatactatatgatactaatatttttgcaaaaaatatgattgaactagtaacctaaaaagttggaattttgataatatttttttcccctcataataataaagtttttcaaatgaccgtagatttttacaagaatctttgcacaaatggcaagatggattcactatttctaatcattatatatagattatacatggttatacacatattatatatgaattatacacataatatatatcgattatttttaatttaatcgattgcttgaactgttatttggttgccttcagtcagttaaggtcgctccaaaaaataatatccgataaaatatttatttttcgtatattaatatatatatatatatatatatatatatatatatatatatatatatgtgtgtgttattttttatattttttatatttagctagcaaatataaattatttttagcttaccggctaaatatataacttgcctttcgtttattcttcattttcgcaaaagctcgaatcctcgaatgtactaatagagcgaagtccaaaaacgccctacttttcacccattccaaatctctccccctcccttacaatctcagtcctctctaatttttaaggtatttctcaaagtacgatgatttgcttctatttcttttttatttatgttttcctgtgaactttgtttcttaaatctgatagtatgaatttgaatctttgacttcatttcttagggtcagcttctttttaggtgtttttatgtgtgaattcatttctgctgatttttcggttgtttttactggtttttgggttttaattccatttagggttttctccttgaagtttaagctttcattttggaaagttttaactcatttttttttgattaatttcctttttatgatgcaggaaattttctttaatatatttgaagagtttgcagttttggagatttggtaaggttttaacttttttgaataatttttttttaacaaagtactctctccgtcctaatttgtttgatgtagttcggatttcgagattgaaacgtggtgttctttgaccatgatttttttgtatgacttttaaatattttgaattgttaatcattgtgacttgtagtactttttaaatttatagattctatgttcgaatttgctgtcaaaattaagaattttgactctcggaatccgaaatgtatcattctttttgaaatgaagggagtattattttatgcctactttctctgaattattacttgctttgtgttggtaggtcaatgattgaaaaggggatttgaagttgtaaatgtgagttaaagttggttgattttgataatggaacaaggtttgcgttctgagggtaataatcctccgagcatcgataagactagggttttggatgtgaagcctttgagatgtcttgcacctgtttttccatccccaaatggaatgtcttctgtttcaactccacagccatcaccttttgtctgtgttcctcccactggtccgttcccccctggggttgctccattttacccctttgtggctccaaatgagtcgggaaggccaggtgaaagtagtcaacaaactccaagtggggtgccgaatcagggcggcccttttggttttgcgcagcctatatctcccgttcctttaaactcattcagaactccaacaactgcgaatggaaatagtgggaggtccaggagggctgtagacgatgatgattacagtaattcacaggatcagaatgaccaatttgccagtggatttagtgtgcacgtgaataatgttgaagattccggtactggaaaaaaaaggggaagaccgaaaaagcctcggagagctcagcaggctgaggggtcaacccctttggaagtggatgttgaacctttgttgactcagttgctcacgtcttttaaacttgttgacttcgatcaggtcaagaaagctgatggtgacaaggagctagtggggagggtactgttggtttttgacttgttcagaagaaggatgacccaaattgacgaatcgagggatgggtcaggttctggtagaagaccagacctaaaagcttctaatatgctgatgacaaagggagttcggacaaaccaaacaaagaggattggaaatgcacccgggattgaagttggtgacatcttcttcttcaggatggaattgtgcctagtgggattgcatgcgccaactatggctgggatagattatatgagtgtcaaactaacaatggacgaagaacctcttgcggtcagcatagtgtcctctggaggatatgatgatgatggaggtgatggcgatgtattaatttacactggccagggtggagtccagaggaaagacgggcaagtgtttgatcagaaacttgagaggggaaaccttgctctggaaaagagtgtgcatcgagccaatgaagtaagagtaattaggggtgttaaggatgtcgcatatccaaccgggaagatttatatttacgacggactttataagattcaggaatcatgggcagagaaaaacaaggtgggctgcaatgtattcaagtacaaacttctgagagtccctgggcagcccgaagcatttaaagtatggaagtcaattcagcaatggaaagatggcgtggcatcacgtgttggagtcatcctaccggacctgacgtctggtgcagaaagtcaaccagtttgtcttgttaatgatgtagatgacgagaaaggacctgcctatttcacatatattcctagtttgaagtactcaaaaccttttgtaatgcctagaccctctccgagttgtcactgcgttggcgggtgccaacctggtgactccaattgcgcttgtattcagagtaatggtggctttttgccttatagttcacttggagttcttttgagttacaaagccttgatacatgagtgtggttcggcctgttcatgccctcctaattgccgaaatcgaatgtctcaaggaggtcctaaagctcgtttggaggtcttcaagacaaaaaatagaggttggggactcagatcttgggatcctatacgtggaggtggtttcatttgtgaatatgctggagaagtcatagacgctggtaattacagtgacgacaattacatttttgatgcaacccgtatatatgcgccattggaagccgagcgtgattataatgacgagtctcggaaagtcccttttcccctggtcataagtgccaagaatggtggaaatatttctcgctttatgaaccatagttgtaacccattcctttcgccattagacacattcctcccatgcaagagttgacctttgattatggtatggacaaagccgatcataggagaaagaagtgcttatgtggctcgttgaactgtagaggttatttttactagtcttcaaggtttgatgacgcaaagggatttttctagtccactggatcaggttaggtttcctttgttcaaaagtcaaaactctcattgtgattgctcatttttcctttttaacccatgggtagtgattatcatgagaaacatagataaagtaaattggtcaatat

SEQ ID NO: 10 - RNA, 20 nt, synthetic construct
  misc_feature 1..20: note = Description of sequence: Oligionucleotide, Named: gRNA1
  source 1..20: mol_type = other RNA
tggagattgtgcatggatct

SEQ ID NO: 11 - RNA, 20 nt, synthetic construct
  misc_feature 1..20: note = Description of sequence: Oligionucleotide, Named: gRNA2
  source 1..20: mol_type = other RNA
atacgttaggtgaacaacta

SEQ ID NO: 12 - RNA, 20 nt, synthetic construct
  misc_feature 1..20: note = Description of sequence: Oligionucleotide, Named: gRNA3
  source 1..20: mol_type = other RNA
gctaagacattcgtagcacg

SEQ ID NO: 13 - RNA, 20 nt, synthetic construct
  misc_feature 1..20: note = Description of sequence: Oligionucleotide, Named: gRNA4
  source 1..20: mol_type = other RNA
caccagacaaagcagatcgt

SEQ ID NO: 14 - RNA, 20 nt, synthetic construct
  misc_feature 1..20: note = Description of sequence: Oligionucleotide, Named: gRNA5
  source 1..20: mol_type = other RNA
actaagccattcgtagcgcg

SEQ ID NO: 15 - RNA, 20 nt, synthetic construct
  misc_feature 1..20: note = Description of sequence: Oligionucleotide, Named: gRNA6
  source 1..20: mol_type = other RNA
cgccagacaaagcagactgt

SEQ ID NO: 16 - RNA, 20 nt, synthetic construct
  misc_feature 1..20: note = Description of sequence: Oligionucleotide, Named: gRNA7
  source 1..20: mol_type = other RNA
gaacaaggtttgcgttctga

SEQ ID NO: 17 - RNA, 20 nt, synthetic construct
  misc_feature 1..20: note = Description of sequence: Oligionucleotide, Named: gRNA8
  source 1..20: mol_type = other RNA
cattcttggcacttatgacc

SEQ ID NO: 18 - DNA, 250 bp, synthetic construct
  misc_feature 1..250: note = Description of sequence: Oligionucleotide, Named: HAP1a/b target site for RNAi
  source 1..250: mol_type = other DNA
gacactgggccaaggaggcccggcagacctcgtgctacgaatgtcttagctgcagaagatgatggtgtctctgattcacagaatcagagcgaccaattcggcagtggctatagcgtgcacgttaatgatgtagaagacacaagtacaggaaaaaaaaggggaagaccgagaaagactaggatgagtcatccagctaactcccatgtcgaagtggatgtcgatccaatactaaatcagctgcttgcgtcct

SEQ ID NO: 19 - DNA, 250 bp, synthetic construct
  misc_feature 1..250: note = Description of sequence: Oligionucleotide, Named: HAP2 target site for RNAi
  source 1..250: mol_type = other DNA
ccctggggttgctccattttacccctttgtggctccaaatgagtcgggaaggccaggtgaaagtagtcaacaaactccaagtggggtgccgaatcagggcggcccttttggttttgcgcagcctatatctcccgttcctttaaactcattcagaactccaacaactgcgaatggaaatagtgggaggtccaggagggctgtagacgatgatgattacagtaattcacaggatcagaatgaccaatttgcc

SEQ ID NO: 20 - DNA, 1242 bp, synthetic construct
  misc_feature 1..1242: note = Description of sequence: Oligionucleotide, Named: EMSmutant NtHap1a
  source 1..1242: mol_type = other DNA
atggatcaaggctttggttcagactctgttccaccagcagggtccattgacaagtctaaggttttagatgttaagcctatgagatgtcttatgcctgtttttccatccccaaatggaatgtcatctgtttcaactcctcaaccctcaccttttgtgtgtgttcctccaagtggtcctttcccacctggggtttctccgttttatccatttttggccccaaatggatccggaagatcaggtgaaaatcaggaatcttttggttttgggacgcctatatctccagttcctttaaattcattcagaactccaactgcgaatggagacactgggccaaggaggcccggcagacctcgtgctacgaatgtcttagctgcagaagatgatggtgtctctgattcacagaatcagagcgaccaattcggcagtggctatagcgtgcacgttaatgatgtagaagacacaagtacaggaaaaaaaaggggaagaccgagaaagactaggatgagtcatccagctaactcccatgtcgaagtggatgtcgatccaatactaaatcagctgcttgcgtcctttaaacttgtcgatgtcgatcaggttaagaaagctgatggtgataaggagctagttgggcgaatactattggcatttgatgtgtttcgtagaaggttgacccagattgatgagaaaaggggtgagactccaggttctgcaagaaggccggacctaaaggctgctaatttgctgatgacaaggggagctcggacaaatcagacaaagaggattggaaatgtacctgggattgaagttggtgacatattcttcttcaggatggaattgtgcctagttggtttgcatgcacctagtatggctgggatagattatatgagtgtcagacttacaggggatgaagagcctattgctgttagcatagtggcctctggaggatatgatgatgaaggggatgatggggatgtgctaatttatactggccagggtggagttcagagacgagatggccaaatgtttgatcagaaacttgagaggggtaatcttgctttggaaaagagtatgcatcgcggaaatgaggtgagagtaattaggggtgttatagatgttacaaatccgagggggaagatttatatgtatgatggcctttacaggatccaggaatcatgggcagagaaaagcaaattgggcgactgcagcattttcaggtacaaattgcttagagtacctgggtag

SEQ ID NO: 21 - DNA, 1953 bp, synthetic construct
  misc_feature 1..1953: note = Description of sequence: Oligionucleotide, Named: EMSmutant NtHap1a
  source 1..1953: mol_type = other DNA
atggatcaaggctttggttcagactctgttccaccagcagggtccattgacaagtctaaggttttagatgttaagcctatgagatgtcttatgcctgtttttccatccccaaatggaatgtcatctgtttcaactcctcaaccctcaccttttgtgtgtgttcctccaagtggtcctttcccacctggggtttctccgttttatccatttttggccccaaatggatccggaagatcaggtgaaaatcaggaatcttttggttttgggacgcctatatctccagttcctttaaattcattcagaactccaactgcgaatggagacactgggccaaggaggcccggcagacctcgtgctacgaatgtcttagctgcagaagatgatggtgtctctgattcacagaatcagagcgaccaattcggcagtggctatagcgtgcacgttaatgatgtagaagacacaagtacaggaaaaaaaaggggaagaccgagaaagactaggatgagtcatccagctaactcccatgtcgaagtggatgtcgatccaatactaaatcagctgcttgcgtcctttaaacttgtcgatgtcgatcaggttaagaaagctgatggtgataaggagctagttgggcgaatactattggcatttgatgtgtttcgtagaaggttgacccagattgatgagaaaaggggtgagactccaggttctgcaagaaggccggacctaaaggctgctaatttgctgatgacaaggggagctcggacaaatcagacaaagaggattggaaatgtacctgggattgaagttggtgacatattcttcttcaggatggaattgtgcctagttggtttgcatgcacctagtatggctgggatagattatatgagtgtcagacttacaggggatgaagagcctattgctgttagcatagtggcctctggaggatatgatgatgaaggggatgatggggatgtgctaatttatactggccagggtggagttcagagacgagatggccaaatgtttgatcagaaacttgagaggggtaatcttgctttggaaaagagtatgcatcgcggaaatgaggtgagagtaattaggggtgttatagatgttacaaatccgagggggaagatttatatgtatgatggcctttacaggatccaggaatcatgggcagagaaaagcaaattgggcgactgcagcattttcaggtacaaattgcttagagtacctgggcagcctgaagcatttacattgtggaaatcaattcagcaatggagggatggaacagcgacacgtgttggagttatcctacctgacctaacatctggtgcagagagtcaacctgtttgtcttgtaaatgatgttgatgatgagaagggacctgcttatttcacatatatccctagtctgaagtactcaaaaccttatatgaagcctaatccatccatgggttgtcaatgtgttggcggatgccaacctggagggtccacttgcccttgcattcagaaaaacggaggctttttgccctttagttcacttggagttcttgtgagttacaaaaccttgatacatgactgtggttctgcctgttcatgccctccgaattgccgaaatcgaatgtctcaagcaggtcctaaagcgcgtgtggaggtcttcaaaacaaaaaatagaggttggggacttaggtcttgggatcccatacgtggaggtggctttatttgtgaatatgccggagaagtcgttgaagagtctagggtaggtgagcttggcaatgacggtgacgatgattatatatttgatgctacccgcatgtatgagccattggaacctgtgcgtgattataacgatgtatcgaaaaaggtcccgtatccccttgtaataagtgcaaaaaagggtggcaatgttgctcgttttatgaaccatagttgttcacctaacgtattctga

SEQ ID NO: 22 - DNA, 1275 bp, synthetic construct
  misc_feature 1..1275: note = Description of sequence: Oligionucleotide, Named: EMSmutant NtHap1a
  source 1..1275: mol_type = other DNA
atggatcaaggctttggttcagactctgttccaccagcagggtccattgacaagtctaaggttttagatgttaagcctatgagatgtcttatgcctgtttttccatccccaaatggaatgtcatctgtttcaactcctcaaccctcaccttttgtgtgtgttcctccaagtggtcctttcccacctggggtttctccgttttatccatttttggccccaaatggatccggaagatcaggtgaaaatcaggaatcttttggttttgggacgcctatatctccagttcctttaaattcattcagaactccaactgcgaatggagacactgggccaaggaggcccggcagacctcgtgctacgaatgtcttagctgcagaagatgatggtgtctctgattcacagaatcagagcgaccaattcggcagtggctatagcgtgcacgttaatgatgtagaagacacaagtacaggaaaaaaaaggggaagaccgagaaagactaggatgagtcatccagctaactcccatgtcgaagtggatgtcgatccaatactaaatcagctgcttgcgtcctttaaacttgtcgatgtcgatcaggttaagaaagctgatggtgataaggagctagttgggcgaatactattggcatttgatgtgtttcgtagaaggttgacccagattgatgagaaaaggggtgagactccaggttctgcaagaaggccggacctaaaggctgctaatttgctgatgacaaggggagctcggacaaatcagacaaagaggattggaaatgtacctgggattgaagttggtgacatattcttcttcaggatggaattgtgcctagttggtttgcatgcacctagtatggctgggatagattatatgagtgtcagacttacaggggatgaagagcctattgctgttagcatagtggcctctggaggatatgatgatgaaggggatgatggggatgtgctaatttatactggccagggtggagttcagagacgagatggccaaatgtttgatcagaaacttgagaggggtaatcttgctttggaaaagagtatgcatcgcggaaatgaggtgagagtaattaggggtgttatagatgttacaaatccgagggggaagatttatatgtatgatggcctttacaggatccaggaatcatgggcagagaaaagcaaattgggcgactgcagcattttcaggtacaaattgcttagagtacctgggcagcctgaagcatttacattgtggaaatcaatttag

SEQ ID NO: 23 - DNA, 1263 bp, synthetic construct
  misc_feature 1..1263: note = Description of sequence: Oligionucleotide, Named: EMSmutant NtHap1a
  source 1..1263: mol_type = other DNA
atggatcaaggctttggttcagactctgttccaccagcagggtccattgacaagtctaaggttttagatgttaagcctatgagatgtcttatgcctgtttttccatccccaaatggaatgtcatctgtttcaactcctcaaccctcaccttttgtgtgtgttcctccaagtggtcctttcccacctggggtttctccgttttatccatttttggccccaaatggatccggaagatcaggtgaaaatcaggaatcttttggttttgggacgcctatatctccagttcctttaaattcattcagaactccaactgcgaatggagacactgggccaaggaggcccggcagacctcgtgctacgaatgtcttagctgcagaagatgatggtgtctctgattcacagaatcagagcgaccaattcggcagtggctatagcgtgcacgttaatgatgtagaagacacaagtacaggaaaaaaaaggggaagaccgagaaagactaggatgagtcatccagctaactcccatgtcgaagtggatgtcgatccaatactaaatcagctgcttgcgtcctttaaacttgtcgatgtcgatcaggttaagaaagctgatggtgataaggagctagttgggcgaatactattggcatttgatgtgtttcgtagaaggttgacccagattgatgagaaaaggggtgagactccaggttctgcaagaaggccggacctaaaggctgctaatttgctgatgacaaggggagctcggacaaatcagacaaagaggattggaaatgtacctgggattgaagttggtgacatattcttcttcaggatggaattgtgcctagttggtttgcatgcacctagtatggctgggatagattatatgagtgtcagacttacaggggatgaagagcctattgctgttagcatagtggcctctggaggatatgatgatgaaggggatgatggggatgtgctaatttatactggccagggtggagttcagagacgagatggccaaatgtttgatcagaaacttgagaggggtaatcttgctttggaaaagagtatgcatcgcggaaatgaggtgagagtaattaggggtgttatagatgttacaaatccgagggggaagatttatatgtatgatggcctttacaggatccaggaatcatgggcagagaaaagcaaattgggcgactgcagcattttcaggtacaaattgcttagagtacctgggcagcctgaagcatttacattgtag

SEQ ID NO: 24 - DNA, 1953 bp, synthetic construct
  misc_feature 1..1953: note = Description of sequence: Oligionucleotide, Named: EMSmutant NtHap1b
  source 1..1953: mol_type = other DNA
atggagcaaggctttggttcagactctgttccaccagcagggtccattgacaagtctaaggttttagatgtgaagcctatgagatgtcttatgcctgtttttccatccccaaatggaatgtcgtctgtttcaactcctcaaccctcaccttttgtgtgtgttcctccaagtggtcctttcccaactggggtttctccattttatccatttttggccccgaatgcggccgcaagatcaggtgaaaatcatgaagcttttggttttgggacgcctatatctcctgttcctttaaattcattcagaactccaactgcgaatggagacaccgggccaaggaggcccggcagacctcgcgctacgaatggcttagttgcagaagatgatggtgtcagtgattcacagaatcagagcgaccaattcggcagtggctatagcgtgcacgttaatgatgtagaagacacaagtacagggaaaaaaaggggaagaccgagaaagactaggatgagtcatccagctaattcccatgtcgaagtggatgtcgatccaatactaaatcagctgcttgcatcctttaaacttgtcgagttcgatcaagctaagaaagctgatggcgacaaggagctagttgggcgaatactattggcatttgatgtgtttcgtagaaggttgacccagattgatgagaaaaggggtgagactccaggttctgcaagaaggccggacctaaaggctgctaatttactgatgacaaagggagctcggacaaatcagacaaagagggttggaaatgtacctgggattgaagttggtgacatattcttcttcaggatggaattgtgtctagttggtttgcatgcacctagtatggctgggatagattatatgagtgtcagacttacaggggatgaagagcctattgctgttagcatagtggcctctggaggatatgatgatgaaggggatgatggggatgtgctaatttatactggccagggtggagtccagagaagggatggccaaatgtttgatcagaaacttgagaggggtaatcttgctttggaaaagagtatgcatcgcggcaatgaggtgagagtaattaggggtgttatagatgttacaaatccgagggggaagatttatatgtatgatggcctttacaggatccaggaatcatgggcagagaaaagcaaattgggtgactgcagcattttcaggtacaaattgcttagagtacctgggcagcctgaagcatttacattgtggaaatcaattcaacaatggagggatggaacagcgacacgtgttggagttatcctacctgacctaacatctggcgcagagagtcaacctgtttgtcttgtaaatgatgttgatgatgagaagggacctgcttatttcacatatatccctagtctgaagtactcaaaaccttatatgaagcctaatccgtctatgggttgtcaatgtgttggcggatgccaacctggagggtccgcttgcccttgcattcagaaaaacggaggctttttgccctttagttcacttggagttcttgtgagttacaaaaccttgatacatgagtgtggttctgcctgttcatgccctccgaattgccgaaatcgaatgtctcaaacaggtcctaaagcgcgtgtggaggtcttcaaaacaaaaaatagaggttggggacttaggtcttgggatcccatacgtggaggtggctttatgtgtgaatatgccggagaagtcgttgaagagtctagggtaggtgagcttggcaatgacggtgacgatgattatatatttgatgctacccgcatgtatgagccattggaacctgtgcgtgattataacgacgaatcgaaaaaagtcccgtatccccttgtaataagtgcaaaaaagggtggcaatgttgctcgttttatgaaccatagttgttcacctaacgtattctag

SEQ ID NO: 25 - DNA, 1953 bp, synthetic construct
  misc_feature 1..1953: note = Description of sequence: Oligionucleotide, Named: EMSmutant NtHap1b
  source 1..1953: mol_type = other DNA
atggagcaaggctttggttcagactctgttccaccagcagggtccattgacaagtctaaggttttagatgtgaagcctatgagatgtcttatgcctgtttttccatccccaaatggaatgtcgtctgtttcaactcctcaaccctcaccttttgtgtgtgttcctccaagtggtcctttcccaactggggtttctccattttatccatttttggccccgaatgcggccgcaagatcaggtgaaaatcatgaagcttttggttttgggacgcctatatctcctgttcctttaaattcattcagaactccaactgcgaatggagacaccgggccaaggaggcccggcagacctcgcgctacgaatggcttagttgcagaagatgatggtgtcagtgattcacagaatcagagcgaccaattcggcagtggctatagcgtgcacgttaatgatgtagaagacacaagtacagggaaaaaaaggggaagaccgagaaagactaggatgagtcatccagctaattcccatgtcgaagtggatgtcgatccaatactaaatcagctgcttgcatcctttaaacttgtcgagttcgatcaagctaagaaagctgatggcgacaaggagctagttgggcgaatactattggcatttgatgtgtttcgtagaaggttgacccagattgatgagaaaaggggtgagactccaggttctgcaagaaggccggacctaaaggctgctaatttactgatgacaaagggagctcggacaaatcagacaaagagggttggaaatgtacctgggattgaagttggtgacatattcttcttcaggatggaattgtgtctagttggtttgcatgcacctagtatggctgggatagattatatgagtgtcagacttacaggggatgaagagcctattgctgttagcatagtggcctctggaggatatgatgatgaaggggatgatggggatgtgctaatttatactggccagggtggagtccagagaagggatggccaaatgtttgatcagaaacttgagaggggtaatcttgctttggaaaagagtatgcatcgcggcaatgaggtgagagtaattaggggtgttatagatgttacaaatccgagggggaagatttatatgtatgatggcctttacaggatccaggaatcatgggcagagaaaagcaaattgggtgactgcagcattttcaggtacaaattgcttagagtacctgggcagcctgaagcatttacattgtggaaatcaattcaacaatggagggatggaacagcgacacgtgttggagttatcctacctgacctaacatctggcgcagagagtcaacctgtttgtcttgtaaatgatgttgatgatgagaagggacctgcttatttcacatatatccctagtctgaagtactcaaaaccttatatgaagcctaatccgtctatgggttgtcaatgtgttggcggatgccaacctggagggtccgcttgcccttgcattcagaaaaacggaggctttttgccctttagttcacttggagttcttgtgagttacaaaaccttgatacatgagtgtggttctgcctgttcatgccctccgaattgccgaaatcgaatgtctcaaacaggtcctaaagcgcgtgtggaggtcttcaaaacaaaaaatagaggttggggacttaggtcttgggatcccatacgtggaggtggctttatgtgtgaatatgccggagaagtcgttgaagagtctagggtaggtgagcttggcaatgacggtgacgatgattatatatttgatgctacccgcatgtatgagccattggaacctgtgcgtgattataacgacgaatcgaaaaaagtcccgtatccccttgtaataagtgcaaaaaagggtggcaatgttgctcgttttatgaaccatagttgttcacctaacgtattctga

SEQ ID NO: 26 - DNA, 300 bp, synthetic construct
  misc_feature 1..300: note = Description of sequence: Oligionucleotide, Named: EMSmutant NtHap2
  source 1..300: mol_type = other DNA
atggaacaaggtttgcgttctgagggtaataatcctccgagcatcgataagactagggttttggatgtgaagcctttgagatgtcttgcacctgtttttccatccccaaatggaatgtcttctgtttcaactccacagccatcaccttttgtctgtgttcctcccactggtccgttcccccctggggttgctccattttacccctttgtggctccaaatgagtcgggaaggccaggtgaaagtagtcaacaaactccaagtggggtgccgaatcagggcggcccttttggttttgcgtag

SEQ ID NO: 27 - protein, 413 aa, synthetic construct
  REGION 1..413: note = Description of sequence: Peptide, Named: EMSmutant NtHap1a
MDQGFGSDSVPPAGSIDKSKVLDVKPMRCLMPVFPSPNGMSSVSTPQPSPFVCVPPSGPFPPGVSPFYPFLAPNGSGRSGENQESFGFGTPISPVPLNSFRTPTANGDTGPRRPGRPRATNVLAAEDDGVSDSQNQSDQFGSGYSVHVNDVEDTSTGKKRGRPRKTRMSHPANSHVEVDVDPILNQLLASFKLVDVDQVKKADGDKELVGRILLAFDVFRRRLTQIDEKRGETPGSARRPDLKAANLLMTRGARTNQTKRIGNVPGIEVGDIFFFRMELCLVGLHAPSMAGIDYMSVRLTGDEEPIAVSIVASGGYDDEGDDGDVLIYTGQGGVQRRDGQMFDQKLERGNLALEKSMHRGNEVRVIRGVIDVTNPRGKIYMYDGLYRIQESWAEKSKLGDCSIFRYKLLRVPG

SEQ ID NO: 28 - protein, 650 aa, synthetic construct
  REGION 1..650: note = Description of sequence: Peptide, Named: EMSmutant NtHap1a
MDQGFGSDSVPPAGSIDKSKVLDVKPMRCLMPVFPSPNGMSSVSTPQPSPFVCVPPSGPFPPGVSPFYPFLAPNGSGRSGENQESFGFGTPISPVPLNSFRTPTANGDTGPRRPGRPRATNVLAAEDDGVSDSQNQSDQFGSGYSVHVNDVEDTSTGKKRGRPRKTRMSHPANSHVEVDVDPILNQLLASFKLVDVDQVKKADGDKELVGRILLAFDVFRRRLTQIDEKRGETPGSARRPDLKAANLLMTRGARTNQTKRIGNVPGIEVGDIFFFRMELCLVGLHAPSMAGIDYMSVRLTGDEEPIAVSIVASGGYDDEGDDGDVLIYTGQGGVQRRDGQMFDQKLERGNLALEKSMHRGNEVRVIRGVIDVTNPRGKIYMYDGLYRIQESWAEKSKLGDCSIFRYKLLRVPGQPEAFTLWKSIQQWRDGTATRVGVILPDLTSGAESQPVCLVNDVDDEKGPAYFTYIPSLKYSKPYMKPNPSMGCQCVGGCQPGGSTCPCIQKNGGFLPFSSLGVLVSYKTLIHDCGSACSCPPNCRNRMSQAGPKARVEVFKTKNRGWGLRSWDPIRGGGFICEYAGEVVEESRVGELGNDGDDDYIFDATRMYEPLEPVRDYNDVSKKVPYPLVISAKKGGNVARFMNHSCSPNVF

SEQ ID NO: 29 - protein, 424 aa, synthetic construct
  REGION 1..424: note = Description of sequence: Peptide, Named: EMSmutant NtHap1a
MDQGFGSDSVPPAGSIDKSKVLDVKPMRCLMPVFPSPNGMSSVSTPQPSPFVCVPPSGPFPPGVSPFYPFLAPNGSGRSGENQESFGFGTPISPVPLNSFRTPTANGDTGPRRPGRPRATNVLAAEDDGVSDSQNQSDQFGSGYSVHVNDVEDTSTGKKRGRPRKTRMSHPANSHVEVDVDPILNQLLASFKLVDVDQVKKADGDKELVGRILLAFDVFRRRLTQIDEKRGETPGSARRPDLKAANLLMTRGARTNQTKRIGNVPGIEVGDIFFFRMELCLVGLHAPSMAGIDYMSVRLTGDEEPIAVSIVASGGYDDEGDDGDVLIYTGQGGVQRRDGQMFDQKLERGNLALEKSMHRGNEVRVIRGVIDVTNPRGKIYMYDGLYRIQESWAEKSKLGDCSIFRYKLLRVPGQPEAFTLWKSI

SEQ ID NO: 30 - protein, 420 aa, synthetic construct
  REGION 1..420: note = Description of sequence: Peptide, Named: EMSmutant NtHap1a
MDQGFGSDSVPPAGSIDKSKVLDVKPMRCLMPVFPSPNGMSSVSTPQPSPFVCVPPSGPFPPGVSPFYPFLAPNGSGRSGENQESFGFGTPISPVPLNSFRTPTANGDTGPRRPGRPRATNVLAAEDDGVSDSQNQSDQFGSGYSVHVNDVEDTSTGKKRGRPRKTRMSHPANSHVEVDVDPILNQLLASFKLVDVDQVKKADGDKELVGRILLAFDVFRRRLTQIDEKRGETPGSARRPDLKAANLLMTRGARTNQTKRIGNVPGIEVGDIFFFRMELCLVGLHAPSMAGIDYMSVRLTGDEEPIAVSIVASGGYDDEGDDGDVLIYTGQGGVQRRDGQMFDQKLERGNLALEKSMHRGNEVRVIRGVIDVTNPRGKIYMYDGLYRIQESWAEKSKLGDCSIFRYKLLRVPGQPEAFTL

SEQ ID NO: 31 - protein, 650 aa, synthetic construct
  REGION 1..650: note = Description of sequence: Peptide, Named: EMSmutant NtHap1b
MEQGFGSDSVPPAGSIDKSKVLDVKPMRCLMPVFPSPNGMSSVSTPQPSPFVCVPPSGPFPTGVSPFYPFLAPNAAARSGENHEAFGFGTPISPVPLNSFRTPTANGDTGPRRPGRPRATNGLVAEDDGVSDSQNQSDQFGSGYSVHVNDVEDTSTGKKRGRPRKTRMSHPANSHVEVDVDPILNQLLASFKLVEFDQAKKADGDKELVGRILLAFDVFRRRLTQIDEKRGETPGSARRPDLKAANLLMTKGARTNQTKRVGNVPGIEVGDIFFFRMELCLVGLHAPSMAGIDYMSVRLTGDEEPIAVSIVASGGYDDEGDDGDVLIYTGQGGVQRRDGQMFDQKLERGNLALEKSMHRGNEVRVIRGVIDVTNPRGKIYMYDGLYRIQESWAEKSKLGDCSIFRYKLLRVPGQPEAFTLWKSIQQWRDGTATRVGVILPDLTSGAESQPVCLVNDVDDEKGPAYFTYIPSLKYSKPYMKPNPSMGCQCVGGCQPGGSACPCIQKNGGFLPFSSLGVLVSYKTLIHECGSACSCPPNCRNRMSQTGPKARVEVFKTKNRGWGLRSWDPIRGGGFMCEYAGEVVEESRVGELGNDGDDDYIFDATRMYEPLEPVRDYNDESKKVPYPLVISAKKGGNVARFMNHSCSPNVF

SEQ ID NO: 32 - protein, 650 aa, synthetic construct; identical to SEQ ID NO: 31
  REGION 1..650: note = Description of sequence: Peptide, Named: EMSmutant NtHap1b

SEQ ID NO: 33 - protein, 99 aa, synthetic construct
  REGION 1..99: note = Description of sequence: Peptide, Named: EMSmutant NtHap2
MEQGLRSEGNNPPSIDKTRVLDVKPLRCLAPVFPSPNGMSSVSTPQPSPFVCVPPTGPFPPGVAPFYPFVAPNESGRPGESSQQTPSGVPNQGGPFGFA

SEQ ID NO: 34 - DNA, 1944 bp, synthetic construct
  misc_feature 1..1944: note = Description of sequence: Mutant, Named: NtHAP1a mutant
  source 1..1944: mol_type = other DNA
atggatcaaggctttggttcagactctgttccaccagcagggtccattgacaagtctaaggttttagatgttaagcctatgagatgtcttatgcctgtttttccatccccaaatggaatgtcatctgtttcaactcctcaaccctcaccttttgtgtgtgttcctccaagtggtcctttcccacctggggtttctccgttttatccatttttggccccaaatggatccggaagatcaggtgaaaatcaggaatcttttggttttgggacgcctatatctccagttcctttaaattcattcagaactccaactgcgaatggagacactgggccaaggaggcccggcagacctcgtgctacgaatgtcttagctgcagaagatgatggtgtctctgattcacagaatcagagcgaccaattcggcagtggctatagcgtgcacgttaatgatgtagaagacacaagtacaggaaaaaaaaggggaagaccgagaaagactaggatgagtcatccagctaactcccatgtcgaagtggatgtcgatccaatactaaatcagctgcttgcgtcctttaaacttgtcgatgtcgatcaggttaagaaagctgatggtgataaggagctagttgggcgaatactattggcatttgatgtgtttcgtagaaggttgacccagattgatgagaaaaggggtgagactccaggttctgcaagaaggccggacctaaaggctgctaatttgctgatgacaaggggagctcggacaaatcagacaaagaggattggaaatgtacctgggattgaagttggtgacatattcttcttcaggatggaattgtgcctagttggtttgcatgcacctagtatggctgggatagattatatgagtgtcagacttacaggggatgaagagcctattgctgttagcatagtggcctctggaggatatgatgatgaaggggatgatggggatgtgctaatttatactggccagggtggagttcagagacgagatggccaaatgtttgatcagaaacttgagaggggtaatcttgctttggaaaagagtatgcatcgcggaaatgaggtgagagtaattaggggtgttatagatgttacaaatccgagggggaagatttatatgtatgatggcctttacaggatccaggaatcatgggcagagaaaagcaaattgggcgactgcagcattttcaggtacaaattgcttagagtacctgggcagcctgaagcatttacattgtggaaatcaattcagcaatggagggatggaacagcgacacgtgttggagttatcctacctgacctaacatctggtgcagagagtcaacctgtttgtcttgtaaatgatgttgatgatgagaagggacctgcttatttcacatatatccctagtctgaagtactcaaaaccttatatgaagcctaatccatccatgggttgtcaatgtgttggcggatgccaacctggagggtccacttgcccttgcattcagaaaaacggaggctttttgccctttagttcacttggagttcttgtgagttacaaaaccttgatacatgactgtggttctgcctgttcatgccctccgaattgccgaaatcgaatgtctcaagcaggtcctaaagcgcgtgtggaggtcttcaaaacaaaaaatagaggttggggacttaggtcttgggatcccatacgtggaggtggctttatttgtgaatatgccggagaagtcgttgaagagtctagggtaggtgagcttggcaatgacggtgacgatgattatatatttgatgctacccgcatgtatgagccattggaacctgtgcgtgattataacgatgtatcgaaaaaggtcccgtatccccttgtaataagtgcaaaaaagggtggcaatgttgctcgttttatgaaccatagattgttcacctaa

SEQ ID NO: 35 - DNA, 1944 bp, synthetic construct
  misc_feature 1..1944: note = Description of sequence: Mutant, Named: NtHAP1a mutant
  source 1..1944: mol_type = other DNA
atggatcaaggctttggttcagactctgttccaccagcagggtccattgacaagtctaaggttttagatgttaagcctatgagatgtcttatgcctgtttttccatccccaaatggaatgtcatctgtttcaactcctcaaccctcaccttttgtgtgtgttcctccaagtggtcctttcccacctggggtttctccgttttatccatttttggccccaaatggatccggaagatcaggtgaaaatcaggaatcttttggttttgggacgcctatatctccagttcctttaaattcattcagaactccaactgcgaatggagacactgggccaaggaggcccggcagacctcgtgctacgaatgtcttagctgcagaagatgatggtgtctctgattcacagaatcagagcgaccaattcggcagtggctatagcgtgcacgttaatgatgtagaagacacaagtacaggaaaaaaaaggggaagaccgagaaagactaggatgagtcatccagctaactcccatgtcgaagtggatgtcgatccaatactaaatcagctgcttgcgtcctttaaacttgtcgatgtcgatcaggttaagaaagctgatggtgataaggagctagttgggcgaatactattggcatttgatgtgtttcgtagaaggttgacccagattgatgagaaaaggggtgagactccaggttctgcaagaaggccggacctaaaggctgctaatttgctgatgacaaggggagctcggacaaatcagacaaagaggattggaaatgtacctgggattgaagttggtgacatattcttcttcaggatggaattgtgcctagttggtttgcatgcacctagtatggctgggatagattatatgagtgtcagacttacaggggatgaagagcctattgctgttagcatagtggcctctggaggatatgatgatgaaggggatgatggggatgtgctaatttatactggccagggtggagttcagagacgagatggccaaatgtttgatcagaaacttgagaggggtaatcttgctttggaaaagagtatgcatcgcggaaatgaggtgagagtaattaggggtgttatagatgttacaaatccgagggggaagatttatatgtatgatggcctttacaggatccaggaatcatgggcagagaaaagcaaattgggcgactgcagcattttcaggtacaaattgcttagagtacctgggcagcctgaagcatttacattgtggaaatcaattcagcaatggagggatggaacagcgacacgtgttggagttatcctacctgacctaacatctggtgcagagagtcaacctgtttgtcttgtaaatgatgttgatgatgagaagggacctgcttatttcacatatatccctagtctgaagtactcaaaaccttatatgaagcctaatccatccatgggttgtcaatgtgttggcggatgccaacctggagggtccacttgcccttgcattcagaaaaacggaggctttttgccctttagttcacttggagttcttgtgagttacaaaaccttgatacatgactgtggttctgcctgttcatgccctccgaattgccgaaatcgaatgtctcaagcaggtcctaaagcgcgtgtggaggtcttcaaaacaaaaaatagaggttggggacttaggtcttgggatcccatacgtggaggtggctttatttgtgaatatgccggagaagtcgttgaagagtctagggtaggtgagcttggcaatgacggtgacgatgattatatatttgatgctacccgcatgtatgagccattggaacctgtgcgtgattataacgatgtatcgaaaaaggtcccgtatccccttgtaataagtgcaaaaaagggtggcaatgttgctcgttttatgaaccatagtttgttcacctaa

SEQ ID NO: 36 - DNA, 1944 bp, synthetic construct
  misc_feature 1..1944: note = Description of sequence: Mutant, Named: NtHAP1b mutant
  source 1..1944: mol_type = other DNA
atggagcaaggctttggttcagactctgttccaccagcagggtccattgacaagtctaaggttttagatgtgaagcctatgagatgtcttatgcctgtttttccatccccaaatggaatgtcgtctgtttcaactcctcaaccctcaccttttgtgtgtgttcctccaagtggtcctttcccaactggggtttctccattttatccatttttggccccgaatgcggccgcaagatcaggtgaaaatcatgaagcttttggttttgggacgcctatatctcctgttcctttaaattcattcagaactccaactgcgaatggagacaccgggccaaggaggcccggcagacctcgcgctacgaatggcttagttgcagaagatgatggtgtcagtgattcacagaatcagagcgaccaattcggcagtggctatagcgtgcacgttaatgatgtagaagacacaagtacagggaaaaaaaggggaagaccgagaaagactaggatgagtcatccagctaattcccatgtcgaagtggatgtcgatccaatactaaatcagctgcttgcatcctttaaacttgtcgagttcgatcaagctaagaaagctgatggcgacaaggagctagttgggcgaatactattggcatttgatgtgtttcgtagaaggttgacccagattgatgagaaaaggggtgagactccaggttctgcaagaaggccggacctaaaggctgctaatttactgatgacaaagggagctcggacaaatcagacaaagagggttggaaatgtacctgggattgaagttggtgacatattcttcttcaggatggaattgtgtctagttggtttgcatgcacctagtatggctgggatagattatatgagtgtcagacttacaggggatgaagagcctattgctgttagcatagtggcctctggaggatatgatgatgaaggggatgatggggatgtgctaatttatactggccagggtggagtccagagaagggatggccaaatgtttgatcagaaacttgagaggggtaatcttgctttggaaaagagtatgcatcgcggcaatgaggtgagagtaattaggggtgttatagatgttacaaatccgagggggaagatttatatgtatgatggcctttacaggatccaggaatcatgggcagagaaaagcaaattgggtgactgcagcattttcaggtacaaattgcttagagtacctgggcagcctgaagcatttacattgtggaaatcaattcaacaatggagggatggaacagcgacacgtgttggagttatcctacctgacctaacatctggcgcagagagtcaacctgtttgtcttgtaaatgatgttgatgatgagaagggacctgcttatttcacatatatccctagtctgaagtactcaaaaccttatatgaagcctaatccgtctatgggttgtcaatgtgttggcggatgccaacctggagggtccgcttgcccttgcattcagaaaaacggaggctttttgccctttagttcacttggagttcttgtgagttacaaaaccttgatacatgagtgtggttctgcctgttcatgccctccgaattgccgaaatcgaatgtctcaaacaggtcctaaagcgcgtgtggaggtcttcaaaacaaaaaatagaggttggggacttaggtcttgggatcccatacgtggaggtggctttatgtgtgaatatgccggagaagtcgttgaagagtctagggtaggtgagcttggcaatgacggtgacgatgattatatatttgatgctacccgcatgtatgagccattggaacctgtgcgtgattataacgacgaatcgaaaaaagtcccgtatccccttgtaataagtgcaaaaaagggtggcaatgttgctcgttttatgaaccatagtttgttcacctaa

SEQ ID NO: 37 - DNA, 2040 bp, synthetic construct
  misc_feature 1..2040: note = Description of sequence: Mutant, Named: NtHAP1a mutant
  source 1..2040: mol_type = other DNA
atggatcaaggctttggttcagactctgttccaccagcagggtccattgacaagtctaaggttttagatgttaagcctatgagatgtcttatgcctgtttttccatccccaaatggaatgtcatctgtttcaactcctcaaccctcaccttttgtgtgtgttcctccaagtggtcctttcccacctggggtttctccgttttatccatttttggccccaaatggatccggaagatcaggtgaaaatcaggaatcttttggttttgggacgcctatatctccagttcctttaaattcattcagaactccaactgcgaatggagacactgggccaaggaggcccggcagacctcgtgctacgaatgtcttagctgcagaagatgatggtgtctctgattcacagaatcagagcgaccaattcggcagtggctatagcgtgcacgttaatgatgtagaagacacaagtacaggaaaaaaaaggggaagaccgagaaagactaggatgagtcatccagctaactcccatgtcgaagtggatgtcgatccaatactaaatcagctgcttgcgtcctttaaacttgtcgatgtcgatcaggttaagaaagctgatggtgataaggagctagttgggcgaatactattggcatttgatgtgtttcgtagaaggttgacccagattgatgagaaaaggggtgagactccaggttctgcaagaaggccggacctaaaggctgctaatttgctgatgacaaggggagctcggacaaatcagacaaagaggattggaaatgtacctgggattgaagttggtgacatattcttcttcaggatggaattgtgcctagttggtttgcatgcacctagtatggctgggatagattatatgagtgtcagacttacaggggatgaagagcctattgctgttagcatagtggcctctggaggatatgatgatgaaggggatgatggggatgtgctaatttatactggccagggtggagttcagagacgagatggccaaatgtttgatcagaaacttgagaggggtaatcttgctttggaaaagagtatgcatcgcggaaatgaggtgagagtaattaggggtgttatagatgttacaaatccgagggggaagatttatatgtatgatggcctttacaggatccaggaatcatgggcagagaaaagcaaattgggcgactgcagcattttcaggtacaaattgcttagagtacctgggcagcctgaagcatttacattgtggaaatcaattcagcaatggagggatggaacagcgacacgtgttggagttatcctacctgacctaacatctggtgcagagagtcaacctgtttgtcttgtaaatgatgttgatgatgagaagggacctgcttatttcacatatatccctagtctgaagtactcaaaaccttatatgaagcctaatccatccatgggttgtcaatgtgttggcggatgccaacctggagggtccacttgcccttgcattcagaaaaacggaggctttttgccctttagttcacttggagttcttgtgagttacaaaaccttgatacatgactgtggttctgcctgttcatgccctccgaattgccgaaatcgaatgtctcaagcaggtcctaaagcgcgtgtggaggtcttcaaaacaaaaaatagaggttggggacttaggtcttgggatcccatacgtggaggtggctttatttgtgaatatgccggagaagtcgttgaagagtctagggtaggtgagcttggcaatgacggtgacgatgattatatatttgatgctacccgcatgtatgagccattggaacctgtgcgtgattataacgatgtatcgaaaaaggtcccgtatccccttgtaataagtgcaaaaaagggtggcaatgttgctcgttttatgaaccatagtgttcacctaacgtattctggcagcttgttgtacgtgaaaataacaatgagacatactactacattgccttttttgccattaggcatattcctcccatgcaagaattga

SEQ ID NO: 38 - DNA, 1923 bp, synthetic construct
  misc_feature 1..1923: note = Description of sequence: Mutant, Named: NtHAP1b mutant
  source 1..1923: mol_type = other DNA
atggagcaaggctttggttcagactctgttccaccagcagggtccattgacaagtctaaggttttagatgtgaagcctatgagatgtcttatgcctgtttttccatccccaaatggaatgtcgtctgtttcaactcctcaaccctcaccttttgtgtgtgttcctccaagtggtcctttcccaactggggtttctccattttatccatttttggccccgaatgcggccgcaagatcaggtgaaaatcatgaagcttttggttttgggacgcctatatctcctgttcctttaaattcattcagaactccaactgcgaatggagacaccgggccaaggaggcccggcagacctcgcgctacgaatggcttagttgcagaagatgatggtgtcagtgattcacagaatcagagcgaccaattcggcagtggctatagcgtgcacgttaatgatgtagaagacacaagtacagggaaaaaaaggggaagaccgagaaagactaggatgagtcatccagctaattcccatgtcgaagtggatgtcgatccaatactaaatcagctgcttgcatcctttaaacttgtcgagttcgatcaagctaagaaagctgatggcgacaaggagctagttgggcgaatactattggcatttgatgtgtttcgtagaaggttgacccagattgatgagaaaaggggtgagactccaggttctgcaagaaggccggacctaaaggctgctaatttactgatgacaaagggagctcggacaaatcagacaaagagggttggaaatgtacctgggattgaagttggtgacatattcttcttcaggatggaattgtgtctagttggtttgcatgcacctagtatggctgggatagattatatgagtgtcagacttacaggggatgaagagcctattgctgttagcatagtggcctctggaggatatgatgatgaaggggatgatggggatgtgctaatttatactggccagggtggagtccagagaagggatggccaaatgtttgatcagaaacttgagaggggtaatcttgctttggaaaagagtatgcatcgcggcaatgaggtgagagtaattaggggtgttatagatgttacaaatccgagggggaagatttatatgtatgatggcctttacaggatccaggaatcatgggcagagaaaagcaaattgggtgactgcagcattttcaggtacaaattgcttagagtacctgggcagcctgaagcatttacattgtggaaatcaattcaacaatggagggatggaacagcgacacgtgttggagttatcctacctgacctaacatctggcgcagagagtcaacctgtttgtcttgtaaatgatgttgatgatgagaagggacctgcttatttcacatatatccctagtctgaagtactcaaaaccttatatgaagcctaatccgtctatgggttgtcaatgtgttggcggatgccaacctggagggtccgcttgcccttgcattcagaaaaacggaggctttttgccctttagttcacttggagttcttgtgagttacaaaaccttgatacatgagtgtggttctgcctgttcatgccctccgaattgccgaaatcgaatgtctcaaacaggtcctaaagcgcgtgtggaggtcttcaaaacaaaaaatagaggttggggacttaggtcttgggatcccatacgtggaggtggctttatgtgtgaatatgccggagaagtcgttgaagagtctagggtaggtgagcttggcaatgacggtgacgatgattatatatttgatgctacccgcatgtatgagccattggaacctgtgcgtgattataacgacgaatcgaaaaaagtcccgtatccccttgtaataatgcaaaaaagggtggcaatgttgctcgttttatga

SEQ ID NO: 39 - DNA, 1944 bp, synthetic construct; identical to SEQ ID NO: 36
  misc_feature 1..1944: note = Description of sequence: Mutant, Named: NtHAP1b mutant
  source 1..1944: mol_type = other DNA

SEQ ID NO: 40 - DNA, 1944 bp, synthetic construct; identical to SEQ ID NO: 35
  misc_feature 1..1944: note = Description of sequence: Mutant, Named: NtHAP1a mutant
  source 1..1944: mol_type = other DNA

SEQ ID NO: 41 - DNA, 1944 bp, synthetic construct
  misc_feature 1..1944: note = Description of sequence: Mutant, Named: NtHAP1b mutant
  source 1..1944: mol_type = other DNA
atggagcaaggctttggttcagactctgttccaccagcagggtccattgacaagtctaaggttttagatgtgaagcctatgagatgtcttatgcctgtttttccatccccaaatggaatgtcgtctgtttcaactcctcaaccctcaccttttgtgtgtgttcctccaagtggtcctttcccaactggggtttctccattttatccatttttggccccgaatgcggccgcaagatcaggtgaaaatcatgaagcttttggttttgggacgcctatatctcctgttcctttaaattcattcagaactccaactgcgaatggagacaccgggccaaggaggcccggcagacctcgcgctacgaatggcttagttgcagaagatgatggtgtcagtgattcacagaatcagagcgaccaattcggcagtggctatagcgtgcacgttaatgatgtagaagacacaagtacagggaaaaaaaggggaagaccgagaaagactaggatgagtcatccagctaattcccatgtcgaagtggatgtcgatccaatactaaatcagctgcttgcatcctttaaacttgtcgagttcgatcaagctaagaaagctgatggcgacaaggagctagttgggcgaatactattggcatttgatgtgtttcgtagaaggttgacccagattgatgagaaaaggggtgagactccaggttctgcaagaaggccggacctaaaggctgctaatttactgatgacaaagggagctcggacaaatcagacaaagagggttggaaatgtacctgggattgaagttggtgacatattcttcttcaggatggaattgtgtctagttggtttgcatgcacctagtatggctgggatagattatatgagtgtcagacttacaggggatgaagagcctattgctgttagcatagtggcctctggaggatatgatgatgaaggggatgatggggatgtgctaatttatactggccagggtggagtccagagaagggatggccaaatgtttgatcagaaacttgagaggggtaatcttgctttggaaaagagtatgcatcgcggcaatgaggtgagagtaattaggggtgttatagatgttacaaatccgagggggaagatttatatgtatgatggcctttacaggatccaggaatcatgggcagagaaaagcaaattgggtgactgcagcattttcaggtacaaattgcttagagtacctgggcagcctgaagcatttacattgtggaaatcaattcaacaatggagggatggaacagcgacacgtgttggagttatcctacctgacctaacatctggcgcagagagtcaacctgtttgtcttgtaaatgatgttgatgatgagaagggacctgcttatttcacatatatccctagtctgaagtactcaaaaccttatatgaagcctaatccgtctatgggttgtcaatgtgttggcggatgccaacctggagggtccgcttgcccttgcattcagaaaaacggaggctttttgccctttagttcacttggagttcttgtgagttacaaaaccttgatacatgagtgtggttctgcctgttcatgccctccgaattgccgaaatcgaatgtctcaaacaggtcctaaagcgcgtgtggaggtcttcaaaacaaaaaatagaggttggggacttaggtcttgggatcccatacgtggaggtggctttatgtgtgaatatgccggagaagtcgttgaagagtctagggtaggtgagcttggcaatgacggtgacgatgattatatatttgatgctacccgcatgtatgagccattggaacctgtgcgtgattataacgacgaatcgaaaaaagtcccgtatccccttgtaataagtgcaaaaaagggtggcaatgttgctcgttttatgaaccatagcttgttcacctaa

SEQ ID NO: 42 - DNA, 2040 bp, synthetic construct; identical to SEQ ID NO: 37
  misc_feature 1..2040: note = Description of sequence: Mutant, Named: NtHAP1a mutant
  source 1..2040: mol_type = other DNA

SEQ ID NO: 43 - DNA, 1944 bp, synthetic construct; identical to SEQ ID NO: 36
  misc_feature 1..1944: note = Description of sequence: Mutant, Named: NtHAP1b mutant
  source 1..1944: mol_type = other DNA

SEQ ID NO: 44 - DNA, 1944 bp, synthetic construct; identical to SEQ ID NO: 35
  misc_feature 1..1944: note = Description of sequence: Mutant, Named: NtHAP1a mutant
  source 1..1944: mol_type = other DNA

SEQ ID NO: 45 - DNA, 2040 bp, synthetic construct
  misc_feature 1..2040: note = Description of sequence: Mutant, Named: NtHAP1b mutant
  source 1..2040: mol_type = other DNA
atggagcaaggctttggttcagactctgttccaccagcagggtccattgacaagtctaaggttttagatgtgaagcctatgagatgtcttatgcctgtttttccatccccaaatggaatgtcgtctgtttcaactcctcaaccctcaccttttgtgtgtgttcctccaagtggtcctttcccaactggggtttctccattttatccatttttggccccgaatgcggccgcaagatcaggtgaaaatcatgaagcttttggttttgggacgcctatatctcctgttcctttaaattcattcagaactccaactgcgaatggagacaccgggccaaggaggcccggcagacctcgcgctacgaatggcttagttgcagaagatgatggtgtcagtgattcacagaatcagagcgaccaattcggcagtggctatagcgtgcacgttaatgatgtagaagacacaagtacagggaaaaaaaggggaagaccgagaaagactaggatgagtcatccagctaattcccatgtcgaagtggatgtcgatccaatactaaatcagctgcttgcatcctttaaacttgtcgagttcgatcaagctaagaaagctgatggcgacaaggagctagttgggcgaatactattggcatttgatgtgtttcgtagaaggttgacccagattgatgagaaaaggggtgagactccaggttctgcaagaaggccggacctaaaggctgctaatttactgatgacaaagggagctcggacaaatcagacaaagagggttggaaatgtacctgggattgaagttggtgacatattcttcttcaggatggaattgtgtctagttggtttgcatgcacctagtatggctgggatagattatatgagtgtcagacttacaggggatgaagagcctattgctgttagcatagtggcctctggaggatatgatgatgaaggggatgatggggatgtgctaatttatactggccagggtggagtccagagaagggatggccaaatgtttgatcagaaacttgagaggggtaatcttgctttggaaaagagtatgcatcgcggcaatgaggtgagagtaattaggggtgttatagatgttacaaatccgagggggaagatttatatgtatgatggcctttacaggatccaggaatcatgggcagagaaaagcaaattgggtgactgcagcattttcaggtacaaattgcttagagtacctgggcagcctgaagcatttacattgtggaaatcaattcaacaatggagggatggaacagcgacacgtgttggagttatcctacctgacctaacatctggcgcagagagtcaacctgtttgtcttgtaaatgatgttgatgatgagaagggacctgcttatttcacatatatccctagtctgaagtactcaaaaccttatatgaagcctaatccgtctatgggttgtcaatgtgttggcggatgccaacctggagggtccgcttgcccttgcattcagaaaaacggaggctttttgccctttagttcacttggagttcttgtgagttacaaaaccttgatacatgagtgtggttctgcctgttcatgccctccgaattgccgaaatcgaatgtctcaaacaggtcctaaagcgcgtgtggaggtcttcaaaacaaaaaatagaggttggggacttaggtcttgggatcccatacgtggaggtggctttatgtgtgaatatgccggagaagtcgttgaagagtctagggtaggtgagcttggcaatgacggtgacgatgattatatatttgatgctacccgcatgtatgagccattggaacctgtgcgtgattataacgacgaatcgaaaaaagtcccgtatccccttgtaataagtgcaaaaaagggtggcaatgttgctcgttttatgaaccatagtgttcacctaacgtattctggcagcttgttgtacgtgaaaataacaatgagacatactaccacattgccttttttgccattaggcatattcctcccatgcaagaattga

SEQ ID NO: 46 - DNA, 1944 bp, synthetic construct; identical to SEQ ID NO: 34
  misc_feature 1..1944: note = Description of sequence: Mutant, Named: NtHAP1a mutant
  source 1..1944: mol_type = other DNA

SEQ ID NO: 47 - DNA, 1944 bp, synthetic construct; identical to SEQ ID NO: 35
  misc_feature 1..1944: note = Description of sequence: Mutant, Named: NtHAP1a mutant
  source 1..1944: mol_type = other DNA

SEQ ID NO: 48 - DNA, 1944 bp, synthetic construct; identical to SEQ ID NO: 41
  misc_feature 1..1944: note = Description of sequence: Mutant, Named: NtHAP1b mutant
  source 1..1944: mol_type = other DNA

SEQ ID NO: 49 - DNA, 1944 bp, synthetic construct; identical to SEQ ID NO: 34
  misc_feature 1..1944: note = Description of sequence: Mutant, Named: NtHAP1a mutant
  source 1..1944: mol_type = other DNA

SEQ ID NO: 50 - DNA, 1944 bp, synthetic construct; identical to SEQ ID NO: 35
  misc_feature 1..1944: note = Description of sequence: Mutant, Named: NtHAP1a mutant
  source 1..1944: mol_type = other DNA

SEQ ID NO: 51 - DNA, 24 bp, synthetic construct
  misc_feature 1..24: note = Description of sequence: Mutant, Named: NtHAP2 mutant
  source 1..24: mol_type = other DNA
atggaacaaggtttgcgttcatga

SEQ ID NO: 52 - DNA, 24 bp, synthetic construct
  misc_feature 1..24: note = Description of sequence: Mutant, Named: NtHAP2 mutant
  source 1..24: mol_type = other DNA
atggaacaaggtttgcgttcttga

SEQ ID NO: 53 - DNA, 2039 bp, synthetic construct
  misc_feature 1..2039: note = Description of sequence: Mutant, Named: NtHAP1a mutant
  source 1..2039: mol_type = other DNA
atggatcaaggctttggttcagactctgttccaccagcagggtccattgacaagtctaaggttttagatgttaagcctatgagatgtcttatgcctgtttttccatccccaaatggaatgtcatctgtttcaactcctcaaccctcaccttttgtgtgtgttcctccaagtggtcctttcccacctggggtttctccgttttatccatttttggccccaaatggatccggaagatcaggtgaaaatcaggaatcttttggttttgggacgcctatatctccagttcctttaaattcattcagaactccaactgcgaatggagacactgggccaaggaggcccggcagacctcgtgctacgaatgtcttagctgcagaagatgatggtgtctctgattcacagaatcagagcgaccaattcggcagtggctatagcgtgcacgttaatgatgtagaagacacaagtacaggaaaaaaaaggggaagaccgagaaagactaggatgagtcatccagctaactcccatgtcgaagtggatgtcgatccaatactaaatcagctgcttgcgtcctttaaacttgtcgatgtcgatcaggttaagaaagctgatggtgataaggagctagttgggcgaatactattggcatttgatgtgtttcgtagaaggttgacccagattgatgagaaaaggggtgagactccaggttctgcaagaaggccggacctaaaggctgctaatttgctgatgacaaggggagctcggacaaatcagacaaagaggattggaaatgtacctgggattgaagttggtgacatattcttcttcaggatggaattgtgcctagttggtttgcatgcacctagtatggctgggatagattatatgagtgtcagacttacaggggatgaagagcctattgctgttagcatagtggcctctggaggatatgatgatgaaggggatgatggggatgtgctaatttatactggccagggtggagttcagagacgagatggccaaatgtttgatcagaaacttgagaggggtaatcttgctttggaaaagagtatgcatcgcggaaatgaggtgagagtaattaggggtgttatagatgttacaaatccgagggggaagatttatatgtatgatggcctttacaggatccaggaatcatgggcagagaaaagcaaattgggcgactgcagcattttcaggtacaaattgcttagagtacctgggcagcctgaagcatttacattgtggaaatcaattcagcaatggagggatggaacagcgacacgtgttggagttatcctacctgacctaacatctggtgcagagagtcaacctgtttgtcttgtaaatgatgttgatgatgagaagggacctgcttatttcacatatatccctagtctgaagtactcaaaaccttatatgaagcctaatccatccatgggttgtcaatgtgttggcggatgccaacctggagggtccacttgcccttgcattcagaaaaacggaggctttttgccctttagttcacttggagttcttgtgagttacaaaaccttgatacatgactgtggttctgcctgttcatgccctccgaattgccgaaatcgaatgtctcaagcaggtcctaaagcgcgtgtggaggtcttcaaaacaaaaaatagaggttggggacttaggtcttgggatcccatacgtggaggtggctttatttgtgaatatgccggagaagtcgttgaagagtctagggtaggtgagcttggcaatgacggtgacgatgattatatatttgatgctacccgcatgtatgagccattggaacctgtgcgtgattataacgatgtatcgaaaaaggtcccgtatccccttgtaataagtgcaaaaaagggtggcaatgttgctcgttttatgaaccataggttcacctaacgtattctggcagcttgttgtacgtgaaaataacaatgagacatactactacattgccttttttgccattaggcatattcctcccatgcaagaattga

SEQ ID NO: 54 - DNA, 1944 bp, synthetic construct
  misc_feature 1..1944: note = Description of sequence: Mutant, Named: NtHAP1b mutant
  source 1..1944: mol_type = other DNA
atggagcaaggctttggttcagactctgttccaccagcagggtccattgacaagtctaaggttttagatgtgaagcctatgagatgtcttatgcctgtttttccatccccaaatggaatgtcgtctgtttcaactcctcaaccctcaccttttgtgtgtgttcctccaagtggtcctttcccaactggggtttctccattttatccatttttggccccgaatgcggccgcaagatcaggtgaaaatcatgaagcttttggttttgggacgcctatatctcctgttcctttaaattcattcagaactccaactgcgaatggagacaccgggccaaggaggcccggcagacctcgcgctacgaatggcttagttgcagaagatgatggtgtcagtgattcacagaatcagagcgaccaattcggcagtggctatagcgtgcacgttaatgatgtagaagacacaagtacagggaaaaaaaggggaagaccgagaaagactaggatgagtcatccagctaattcccatgtcgaagtggatgtcgatccaatactaaatcagctgcttgcatcctttaaacttgtcgagttcgatcaagctaagaaagctgatggcgacaaggagctagttgggcgaatactattggcatttgatgtgtttcgtagaaggttgacccagattgatgagaaaaggggtgagactccaggttctgcaagaaggccggacctaaaggctgctaatttactgatgacaaagggagctcggacaaatcagacaaagagggttggaaatgtacctgggattgaagttggtgacatattcttcttcaggatggaattgtgtctagttggtttgcatgcacctagtatggctgggatagattatatgagtgtcagacttacaggggatgaagagcctattgctgttagcatagtggcctctggaggatatgatgatgaaggggatgatggggatgtgctaatttatactggccagggtggagtccagagaagggatggccaaatgtttgatcagaaacttgagaggggtaatcttgctttggaaaagagtatgcatcgcggcaatgaggtgagagtaattaggggtgttatagatgttacaaatccgagggggaagatttatatgtatgatggcctttacaggatccaggaatcatgggcagagaaaagcaaattgggtgactgcagcattttcaggtacaaattgcttagagtacctgggcagcctgaagcatttacattgtggaaatcaattcaacaatggagggatggaacagcgacacgtgttggagttatcctacctgacctaacatctggcgcagagagtcaacctgtttgtcttgtaaatgatgttgatgatgagaagggacctgcttatttcacatatatccctagtctgaagtactcaaaaccttatatgaagcctaatccgtctatgggttgtcaatgtgttggcggatgccaacctggagggtccgcttgcccttgcattcagaaaaacggaggctttttgccctttagttcacttggagttcttgtgagttacaaaaccttgatacatgagtgtggttctgcctgttcatgccctccgaattgccgaaatcgaatgtctcaaacaggtcctaaagcgcgtgtggaggtcttcaaaacaaaaaatagaggttggggacttaggtcttgggatcccatacgtggaggtggctttatgtgtgaatatgccggagaagtcgttgaagagtctagggtaggtgagcttggcaatgacggtgacgatgattatatatttgatgctacccgcatgtatgagccattggaacctgtgcgtgattataacgacgaatcgaaaaaagtcccgtatccccttgtaataagtgcaaaaaagggtggcaatgttgctcgttttatgaaccatagattgttcacctaa

SEQ ID NO: 55 - DNA, 1944 bp, synthetic construct; identical to SEQ ID NO: 36
  misc_feature 1..1944: note = Description of sequence: Mutant, Named: NtHAP1b mutant
  source 1..1944: mol_type = other DNA

SEQ ID NO: 56 - DNA, 69 bp, synthetic construct
  misc_feature 1..69: note = Description of sequence: Mutant, Named: NtHAP2 mutant
  source 1..69: mol_type = other DNA
atggaacaaggtttgcgtttgagggtaataatcctccgagcatcgataagactagggttttggatgtga

SEQ ID NO: 57 - DNA, 1944 bp, synthetic construct; identical to SEQ ID NO: 34
  misc_feature 1..1944: note = Description of sequence: Mutant, Named: NtHAP1a mutant
  source 1..1944: mol_type = other DNA

SEQ ID NO: 58 - DNA, 1944 bp, synthetic construct; identical to SEQ ID NO: 35
  misc_feature 1..1944: note = Description of sequence: Mutant, Named: NtHAP1a mutant
  source 1..1944: mol_type = other DNA

SEQ ID NO: 59 - DNA, 24 bp, synthetic construct
  misc_feature 1..24: note = Description of sequence: Mutant, Named: NtHAP2 mutant
  source 1..24: mol_type = other DNA
atggaacaaggtttgcgttcatga

SEQ ID NO: 60 - DNA, 24 bp, synthetic construct
  misc_feature 1..24: note = Description of sequence: Mutant, Named: NtHAP2 mutant
  source 1..24: mol_type = other DNA
atggaacaaggtttgcgttcttga

SEQ ID NO: 61 - DNA, 2088 bp, synthetic construct
  misc_feature 1..2088: note = Description of sequence: Mutant, Named: NtHAP1a mutant
  source 1..2088: mol_type = other DNA
atggatcaaggctttggttcagactctgttccaccagcagggtccattgacaagtctaaggttttagatgttaagcctatgagatgtcttatgcctgtttttccatccccaaatggaatgtcatctgtttcaactcctcaaccctcaccttttgtgtgtgttcctccaagtggtcctttcccacctggggtttctccgttttatccatttttggccccaaatggatccggaagatcaggtgaaaatcaggaatcttttggttttgggacgcctatatctccagttcctttaaattcattcagaactccaactgcgaatggagacactgggccaaggaggcccggcagacctcgtgctacgaatgtcttagctgcagaagatgatggtgtctctgattcacagaatcagagcgaccaattcggcagtggctatagcgtgcacgttaatgatgtagaagacacaagtacaggaaaaaaaaggggaagaccgagaaagactaggatgagtcatccagctaactcccatgtcgaagtggatgtcgatccaatactaaatcagctgcttgcgtcctttaaacttgtcgatgtcgatcaggttaagaaagctgatggtgataaggagctagttgggcgaatactattggcatttgatgtgtttcgtagaaggttgacccagattgatgagaaaaggggtgagactccaggttctgcaagaaggccggacctaaaggctgctaatttgctgatgacaaggggagctcggacaaatcagacaaagaggattggaaatgtacctgggattgaagttggtgacatattcttcttcaggatggaattgtgcctagttggtttgcatgcacctagtatggctgggatagattatatgagtgtcagacttacaggggatgaagagcctattgctgttagcatagtggcctctggaggatatgatgatgaaggggatgatggggatgtgctaatttatactggccagggtggagttcagagacgagatggccaaatgtttgatcagaaacttgagaggggtaatcttgctttggaaaagagtatgcatcgcggaaatgaggtgagagtaattaggggtgttatagatgttacaaatccgagggggaagatttatatgtatgatggcctttacaggatccaggaatcatgggcagagaaaagcaaattgggcgactgcagcattttcaggtacaaattgcttagagtacctgggcagcctgaagcatttacattgtggaaatcaattcagcaatggagggatggaacagcgacacgtgttggagttatcctacctgacctaacatctggtgcagagagtcaacctgtttgtcttgtaaatgatgttgatgatgagaagggacctgcttatttcacatatatccctagtctgaagtactcaaaaccttatatgaagcctaatccatccatgggttgtcaatgtgttggcggatgccaacctggagggtccacttgcccttgcattcagaaaaacggaggctttttgccctttagttcacttggagttcttgtgagttacaaaaccttgatacatgactgtggttctgcctgttcatgccctccgaattgccgaaatcgaatgtctcaagcaggtcctaaagcgcgtgtggaggtcttcaaaacaaaaaatagaggttggggacttaggtcttgggatcccatacgtggaggtggctttatttgtgaatatgccggagaagtcgttgaagagtctagggtaggtgagcttggcaatgacggtgacgatgattatatatttgatgctacccgcatgtatgagccattggaacctgtgcgtgattataacgatgtatcgaaaaaggtcccgtatccccttgtaataagtgcaaaaaagggtggcaatgttgctcgttttatgaaccatagttgttcacctaacgtattctggcagcttgttgtacgtgaaaataacaatgagacatactactacattgccttttttgccattaggcatattcctcccatgcaagaattgacttttgattattccgtaggaggaagaagtgcttgtgtgggtcattga

SEQ ID NO: 62 - DNA, 2088 bp, synthetic construct; identical to SEQ ID NO: 61
  misc_feature 1..2088: note = Description of sequence: Mutant, Named: NtHAP1a mutant
  source 1..2088: mol_type = other DNA

SEQ ID NO: 63 - DNA, 2085 bp, synthetic construct
  misc_feature 1..2085: note = Description of sequence: Mutant, Named: NtHAP1a mutant
  source 1..2085: mol_type = other DNA
atggatcaaggctttggttcagactctgttccaccagcagggtccattgacaagtctaaggttttagatgttaagcctatgagatgtcttatgcctgtttttccatccccaaatggaatgtcatctgtttcaactcctcaaccctcaccttttgtgtgtgttcctccaagtggtcctttcccacctggggtttctccgttttatccatttttggccccaaatggatccggaagatcaggtgaaaatcaggaatcttttggttttgggacgcctatatctccagttcctttaaattcattcagaactccaactgcgaatggagacactgggccaaggaggcccggcagacctcgtgctacgaatgtcttagctgcagaagatgatggtgtctctgattcacagaatcagagcgaccaattcggcagtggctatagcgtgcacgttaatgatgtagaagacacaagtacaggaaaaaaaaggggaagaccgagaaagactaggatgagtcatccagctaactcccatgtcgaagtggatgtcgatccaatactaaatcagctgcttgcgtcctttaaacttgtcgatgtcgatcaggttaagaaagctgatggtgataaggagctagttgggcgaatactattggcatttgatgtgtttcgtagaaggttgacccagattgatgagaaaaggggtgagactccaggttctgcaagaaggccggacctaaaggctgctaatttgctgatgacaaggggagctcggacaaatcagacaaagaggattggaaatgtacctgggattgaagttggtgacatattcttcttcaggatggaattgtgcctagttggtttgcatgcacctagtatggctgggatagattatatgagtgtcagacttacaggggatgaagagcctattgctgttagcatagtggcctctggaggatatgatgatgaaggggatgatggggatgtgctaatttatactggccagggtggagttcagagacgagatggccaaatgtttgatcagaaacttgagaggggtaatcttgctttggaaaagagtatgcatcgcggaaatgaggtgagagtaattaggggtgttatagatgttacaaatccgagggggaagatttatatgtatgatggcctttacaggatccaggaatcatgggcagagaaaagcaaattgggcgactgcagcattttcaggtacaaattgcttagagtacctgggcagcctgaagcatttacattgtggaaatcaattcagcaatggagggatggaacagcgacacgtgttggagttatcctacctgacctaacatctggtgcagagagtcaacctgtttgtcttgtaaatgatgttgatgatgagaagggacctgcttatttcacatatatccctagtctgaagtactcaaaaccttatatgaagcctaatccatccatgggttgtcaatgtgttggcggatgccaacctggagggtccacttgcccttgcattcagaaaaacggaggctttttgccctttagttcacttggagttcttgtgagttacaaaaccttgatacatgactgtggttctgcctgttcatgccctccgaattgccgaaatcgaatgtctcaagcaggtcctaaagcgcgtgtggaggtcttcaaaacaaaaaatagaggttggggacttaggtcttgggatcccatacgtggaggtggctttatttgtgaatatgccggagaagtcgttgaagagtctagggtaggtgagcttggcaatgacggtgacgatgattatatatttgatgctacccgcatgtatgagccattggaacctgtgcgtgattataacgatgtatcgaaaaaggtcccgtatccccttgtaataagtgcaaaaaagggtggcaatgttgctcgttttatgaaccatagttgttcacctaacgtattctggcagcttgttgtacgtgaaaataacaatgagacatactactacattgccttttttgccattaggcatattcctcccatgcaagaattgacttttgattatggcatggttccaccagacaaagcagattcgtag

SEQ ID NO: 64 - DNA, 2085 bp, synthetic construct; identical to SEQ ID NO: 63
  misc_feature 1..2085: note = Description of sequence: Mutant, Named: NtHAP1a mutant
  source 1..2085: mol_type = other DNA

SEQ ID NO: 65 - DNA, 2154 bp, synthetic construct
  misc_feature 1..2154: note = Description of sequence: Mutant, Named: NtHAP1a mutant
  source 1..2154: mol_type = other DNA
atggatcaaggctttggttcagactctgttccaccagcagggtccattgacaagtctaaggttttagatgttaagcctatgagatgtcttatgcctgtttttccatccccaaatggaatgtcatctgtttcaactcctcaaccctcaccttttgtgtgtgttcctccaagtggtcctttcccacctggggtttctccgttttatccatttttggccccaaatggatccggaagatcaggtgaaaatcaggaatcttttggttttgggacgcctatatctccagttcctttaaattcattcagaactccaactgcgaatggagacactgggccaaggaggcccggcagacctcgtgctacgaatgtcttagctgcagaagatgatggtgtctctgattcacagaatcagagcgaccaattcggcagtggctatagcgtgcacgttaatgatgtagaagacacaagtacaggaaaaaaaaggggaagaccgagaaagactaggatgagtcatccagctaactcccatgtcgaagtggatgtcgatccaatactaaatcagctgcttgcgtcctttaaacttgtcgatgtcgatcaggttaagaaagctgatggtgataaggagctagttgggcgaatactattggcatttgatgtgtttcgtagaaggttgacccagattgatgagaaaaggggtgagactccaggttctgcaagaaggccggacctaaaggctgctaatttgctgatgacaaggggagctcggacaaatcagacaaagaggattggaaatgtacctgggattgaagttggtgacatattcttcttcaggatggaattgtgcctagttggtttgcatgcacctagtatggctgggatagattatatgagtgtcagacttacaggggatgaagagcctattgctgttagcatagtggcctctggaggatatgatgatgaaggggatgatggggatgtgctaatttatactggccagggtggagttcagagacgagatggccaaatgtttgatcagaaacttgagaggggtaatcttgctttggaaaagagtatgcatcgcggaaatgaggtgagagtaattaggggtgttatagatgttacaaatccgagggggaagatttatatgtatgatggcctttacaggatccaggaatcatgggcagagaaaagcaaattgggcgactgcagcattttcaggtacaaattgcttagagtacctgggcagcctgaagcatttacattgtggaaatcaattcagcaatggagggatggaacagcgacacgtgttggagttatcctacctgacctaacatctggtgcagagagtcaacctgtttgtcttgtaaatgatgttgatgatgagaagggacctgcttatttcacatatatccctagtctgaagtactcaaaaccttatatgaagcctaatccatccatgggttgtcaatgtgttggcggatgccaacctggagggtccacttgcccttgcattcagaaaaacggaggctttttgccctttagttcacttggagttcttgtgagttacaaaaccttgatacatgactgtggttctgcctgttcatgccctccgaattgccgaaatcgaatgtctcaagcaggtcctaaagcgcgtgtggaggtcttcaaaacaaaaaatagaggttggggacttaggtcttgggatcccatacgtggaggtggctttatttgtgaatatgccggagaagtcgttgaagagtctagggtaggtgagcttggcaatgacggtgacgatgattatatatttgatgctacccgcatgtatgagccattggaacctgtgcgtgattataacgatgtatcgaaaaaggtcccgtatccccttgtaataagtgcaaaaaagggtggcaatgttgctcgttttatgaaccatagttgttcacctaacgtattctggcagcttgttgtacgtgaaaataacaatgagacatactactacattgccttttttgccattaggcatattcctcccatgcaagaattgacttttgattatggcatggttccaccagacaaagcagaggttacttttatgcaagaattaccattaggcatattcctcttcgtaggaggaagaagtgcttgtgtgggtcattga

SEQ ID NO: 66 - DNA, 2082 bp, synthetic construct
  misc_feature 1..2082: note = Description of sequence: Mutant, Named: NtHAP1a mutant
  source 1..2082: mol_type = other DNA
atggatcaaggctttggttcagactctgttccaccagcagggtccattgacaagtctaaggttttagatgttaagcctatgagatgtcttatgcctgtttttccatccccaaatggaatgtcatctgtttcaactcctcaaccctcaccttttgtgtgtgttcctccaagtggtcctttcccacctggggtttctccgttttatccatttttggccccaaatggatccggaagatcaggtgaaaatcaggaatcttttggttttgggacgcctatatctccagttcctttaaattcattcagaactccaactgcgaatggagacactgggccaaggaggcccggcagacctcgtgctacgaatgtcttagctgcagaagatgatggtgtctctgattcacagaatcagagcgaccaattcggcagtggctatagcgtgcacgttaatgatgtagaagacacaagtacaggaaaaaaaaggggaagaccgagaaagactaggatgagtcatccagctaactcccatgtcgaagtggatgtcgatccaatactaaatcagctgcttgcgtcctttaaacttgtcgatgtcgatcaggttaagaaagctgatggtgataaggagctagttgggcgaatactattggcatttgatgtgtttcgtagaaggttgacccagattgatgagaaaaggggtgagactccaggttctgcaagaaggccggacctaaaggctgctaatttgctgatgacaaggggagctcggacaaatcagacaaagaggattggaaatgtacctgggattgaagttggtgacatattcttcttcaggatggaattgtgcctagttggtttgcatgcacctagtatggctgggatagattatatgagtgtcagacttacaggggatgaagagcctattgctgttagcatagtggcctctggaggatatgatgatgaaggggatgatggggatgtgctaatttatactggccagggtggagttcagagacgagatggccaaatgtttgatcagaaacttgagaggggtaatcttgctttggaaaagagtatgcatcgcggaaatgaggtgagagtaattaggggtgttatagatgttacaaatccgagggggaagatttatatgtatgatggcctttacaggatccaggaatcatgggcagagaaaagcaaattgggcgactgcagcattttcaggtacaaattgcttagagtacctgggcagcctgaagcatttacattgtggaaatcaattcagcaatggagggatggaacagcgacacgtgttggagttatcctacctgacctaacatctggtgcagagagtcaacctgtttgtcttgtaaatgatgttgatgatgagaagggacctgcttatttcacatatatccctagtctgaagtactcaaaaccttatatgaagcctaatccatccatgggttgtcaatgtgttggcggatgccaacctggagggtccacttgcccttgcattcagaaaaacggaggctttttgccctttagttcacttggagttcttgtgagttacaaaaccttgatacatgactgtggttctgcctgttcatgccctccgaattgccgaaatcgaatgtctcaagcaggtcctaaagcgcgtgtggaggtcttcaaaacaaaaaatagaggttggggacttaggtcttgggatcccatacgtggaggtggctttatttgtgaatatgccggagaagtcgttgaagagtctagggtaggtgagcttggcaatgacggtgacgatgattatatatttgatgctacccgcatgtatgagccattggaacctgtgcgtgattataacgatgtatcgaaaaaggtcccgtatccccttgtaataagtgcaaaaaagggtggcaatgttgctcgttttatgaaccatagttgttcacctaacgtattctggcagcttgttgtacgtgaaaataacaatgagacatactactacattgccttttttgccattaggcatattcttcgtaggaggaagaagtgcttgtgtgggtcattgaactgcagaggttacttttactag

SEQ ID NO: 67 - DNA, 2085 bp, synthetic construct
  misc_feature 1..2085: note = Description of sequence: Mutant, Named: NtHAP1a mutant
  source 1..2085: mol_type = other DNA
atggatcaaggctttggttcagactctgttccaccagcagggtccattgacaagtctaaggttttagatgttaagcctatgagatgtcttatgcctgtttttccatccccaaatggaatgtcatctgtttcaactcctcaaccctcaccttttgtgtgtgttcctccaagtggtcctttcccacctggggtttctccgttttatccatttttggccccaaatggatccggaagatcaggtgaaaatcaggaatcttttggttttgggacgcctatatctccagttcctttaaattcattcagaactccaactgcgaatggagacactgggccaaggaggcccggcagacctcgtgctacgaatgtcttagctgcagaagatgatggtgtctctgattcacagaatcagagcgaccaattcggcagtggctatagcgtgcacgttaatgatgtagaagacacaagtacaggaaaaaaaaggggaagaccgagaaagactaggatgagtcatccagctaactcccatgtcgaagtggatgtcgatccaatactaaatcagctgcttgcgtcctttaaacttgtcgatgtcgatcaggttaagaaagctgatggtgataaggagctagttgggcgaatactattggcatttgatgtgtttcgtagaaggttgacccagattgatgagaaaaggggtgagactccaggttctgcaagaaggccggacctaaaggctgctaatttgctgatgacaaggggagctcggacaaatcagacaaagaggattggaaatgtacctgggattgaagttggtgacatattcttcttcaggatggaattgtgcctagttggtttgcatgcacctagtatggctgggatagattatatgagtgtcagacttacaggggatgaagagcctattgctgttagcatagtggcctctggaggatatgatgatgaaggggatgatggggatgtgctaatttatactggccagggtggagttcagagacgagatggccaaatgtttgatcagaaacttgagaggggtaatcttgctttggaaaagagtatgcatcgcggaaatgaggtgagagtaattaggggtgttatagatgttacaaatccgagggggaagatttatatgtatgatggcctttacaggatccaggaatcatgggcagagaaaagcaaattgggcgactgcagcattttcaggtacaaattgcttagagtacctgggcagcctgaagcatttacattgtggaaatcaattcagcaatggagggatggaacagcgacacgtgttggagttatcctacctgacctaacatctggtgcagagagtcaacctgtttgtcttgtaaatgatgttgatgatgagaagggacctgcttatttcacatatatccctagtctgaagtactcaaaaccttatatgaagcctaatccatccatgggttgtcaatgtgttggcggatgccaacctggagggtccacttgcccttgcattcagaaaaacggaggctttttgccctttagttcacttggagttcttgtgagttacaaaaccttgatacatgactgtggttctgcctgttcatgccctccgaattgccgaaatcgaatgtctcaagcaggtcctaaagcgcgtgtggaggtcttcaaaacaaaaaatagaggttggggacttaggtcttgggatcccatacgtggaggtggctttatttgtgaatatgccggagaagtcgttgaagagtctagggtaggtgagcttggcaatgacggtgacgatgattatatatttgatgctacccgcatgtatgagccattggaacctgtgcgtgattataacgatgtatcgaaaaaggtcccgtatccccttgtaataagtgcaaaaaagggtggcaatgttgctcgttttatgaaccatagttgttcacctaacgtattctggcagcttgttgtacgtgaaaataacaatgagacatactactacattgccttttttgccattaggcatattcctcccatgcaagaattgacttttgattatggcatggttccaccagacaaagcagatacgtag

SEQ ID NO: 68 - DNA, 2112 bp, synthetic construct
  misc_feature 1..2112: note = Description of sequence: Mutant, Named: NtHAP1a mutant
  source 1..2112: mol_type = other DNA
atggatcaaggctttggttcagactctgttccaccagcagggtccattgacaagtctaaggttttagatgttaagcctatgagatgtcttatgcctgtttttccatccccaaatggaatgtcatctgtttcaactcctcaaccctcaccttttgtgtgtgttcctccaagtggtcctttcccacctggggtttctccgttttatccatttttggccccaaatggatccggaagatcaggtgaaaatcaggaatcttttggttttgggacgcctatatctccagttcctttaaattcattcagaactccaactgcgaatggagacactgggccaaggaggcccggcagacctcgtgctacgaatgtcttagctgcagaagatgatggtgtctctgattcacagaatcagagcgaccaattcggcagtggctatagcgtgcacgttaatgatgtagaagacacaagtacaggaaaaaaaaggggaagaccgagaaagactaggatgagtcatccagctaactcccatgtcgaagtggatgtcgatccaatactaaatcagctgcttgcgtcctttaaacttgtcgatgtcgatcaggttaagaaagctgatggtgataaggagctagttgggcgaatactattggcatttgatgtgtttcgtagaaggttgacccagattgatgagaaaaggggtgagactccaggttctgcaagaaggccggacctaaaggctgctaatttgctgatgacaaggggagctcggacaaatcagacaaagaggattggaaatgtacctgggattgaagttggtgacatattcttcttcaggatggaattgtgcctagttggtttgcatgcacctagtatggctgggatagattatatgagtgtcagacttacaggggatgaagagcctattgctgttagcatagtggcctctggaggatatgatgatgaaggggatgatggggatgtgctaatttatactggccagggtggagttcagagacgagatggccaaatgtttgatcagaaacttgagaggggtaatcttgctttggaaaagagtatgcatcgcggaaatgaggtgagagtaattaggggtgttatagatgttacaaatccgagggggaagatttatatgtatgatggcctttacaggatccaggaatcatgggcagagaaaagcaaattgggcgactgcagcattttcaggtacaaattgcttagagtacctgggcagcctgaagcatttacattgtggaaatcaattcagcaatggagggatggaacagcgacacgtgttggagttatcctacctgacctaacatctggtgcagagagtcaacctgtttgtcttgtaaatgatgttgatgatgagaagggacctgcttatttcacatatatccctagtctgaagtactcaaaaccttatatgaagcctaatccatccatgggttgtcaatgtgttggcggatgccaacctggagggtccacttgcccttgcattcagaaaaacggaggctttttgccctttagttcacttggagttcttgtgagttacaaaaccttgatacatgactgtggttctgcctgttcatgccctccgaattgccgaaatcgaatgtctcaagcaggtcctaaagcgcgtgtggaggtcttcaaaacaaaaaatagaggttggggacttaggtcttgggatcccatacgtggaggtggctttatttgtgaatatgccggagaagtcgttgaagagtctagggtaggtgagcttggcaatgacggtgacgatgattatatatttgatgctacccgcatgtatgagccattggaacctgtgcgtgattataacgatgtatcgaaaaaggtcccgtatccccttgtaataagtgcaaaaaagggtggcaatgttgctcgttttatgaaccatagttgttcacctaacgtattctggcagcttgttgtacgtgaaaataacaatgagacatactactacattgccttttttgccattaggcatattcctcccatgcaagaattgacttttgattatggcatggttccaccagacaaagcagtcgtaggaggaagaagtgcttgtgtgggtcattga

SEQ ID NO: 69 - DNA, 2139 bp, synthetic construct
  misc_feature 1..2139: note = Description of sequence: Mutant, Named: NtHAP1a mutant
  source 1..2139: mol_type = other DNA
atggatcaaggctttggttcagactctgttccaccagcagggtccattgacaagtctaaggttttagatgttaagcctatgagatgtcttatgcctgtttttccatccccaaatggaatgtcatctgtttcaactcctcaaccctcaccttttgtgtgtgttcctccaagtggtcctttcccacctggggtttctccgttttatccatttttggccccaaatggatccggaagatcaggtgaaaatcaggaatcttttggttttgggacgcctatatctccagttcctttaaattcattcagaactccaactgcgaatggagacactgggccaaggaggcccggcagacctcgtgctacgaatgtcttagctgcagaagatgatggtgtctctgattcacagaatcagagcgaccaattcggcagtggctatagcgtgcacgttaatgatgtagaagacacaagtacaggaaaaaaaaggggaagaccgagaaagactaggatgagtcatccagctaactcccatgtcgaagtggatgtcgatccaatactaaatcagctgcttgcgtcctttaaacttgtcgatgtcgatcaggttaagaaagctgatggtgataaggagctagttgggcgaatactattggcatttgatgtgtttcgtagaaggttgacccagattgatgagaaaaggggtgagactccaggttctgcaagaaggccggacctaaaggctgctaatttgctgatgacaaggggagctcggacaaatcagacaaagaggattggaaatgtacctgggattgaagttggtgacatattcttcttcaggatggaattgtgcctagttggtttgcatgcacctagtatggctgggatagattatatgagtgtcagacttacaggggatgaagagcctattgctgttagcatagtggcctctggaggatatgatgatgaaggggatgatggggatgtgctaatttatactggccagggtggagttcagagacgagatggccaaatgtttgatcagaaacttgagaggggtaatcttgctttggaaaagagtatgcatcgcggaaatgaggtgagagtaattaggggtgttatagatgttacaaatccgagggggaagatttatatgtatgatggcctttacaggatccaggaatcatgggcagagaaaagcaaattgggcgactgcagcattttcaggtacaaattgcttagagtacctgggcagcctgaagcatttacattgtggaaatcaattcagcaatggagggatggaacagcgacacgtgttggagttatcctacctgacctaacatctggtgcagagagtcaacctgtttgtcttgtaaatgatgttgatgatgagaagggacctgcttatttcacatatatccctagtctgaagtactcaaaaccttatatgaagcctaatccatccatgggttgtcaatgtgttggcggatgccaacctggagggtccacttgcccttgcattcagaaaaacggaggctttttgccctttagttcacttggagttcttgtgagttacaaaaccttgatacatgactgtggttctgcctgttcatgccctccgaattgccgaaatcgaatgtctcaagcaggtcctaaagcgcgtgtggaggtcttcaaaacaaaaaatagaggttggggacttaggtcttgggatcccatacgtggaggtggctttatttgtgaatatgccggagaagtcgttgaagagtctagggtaggtgagcttggcaatgacggtgacgatgattatatatttgatgctacccgcatgtatgagccattggaacctgtgcgtgattataacgatgtatcgaaaaaggtcccgtatccccttgtaataagtgcaaaaaagggtggcaatgttgctcgttttatgaaccatagttgttcacctaacgtattctggcagcttgttgtacgtgaaaataacaatgagacatactactacattgccttttttgccattaggcatattcctcccatgcaagaattgacttttgattatggcatggttccaccagacaaagcagaggttacttttactagttgtcatggtctgatgaaagaaatgaagttcactggtcaccactga

SEQ ID NO: 70 - DNA, 348 bp, synthetic construct
  misc_feature 1..348: note = Description of sequence: Mutant, Named: NtHAP1a mutant
  source 1..348: mol_type = other DNA
atggatcaaggctttggttcagactctgttccaccagcagggtccattgacaagtctaaggttttagatgttaagcctatgagatgtcttatgcctgtttttccatccccaaatggaatgtcatctgtttcaactcctcaaccctcaccttttgtgtgtgttcctccaagtggtcctttcccacctggggtttctccgttttatccatttttggccccaaatggatccggaagatcaggtgaaaatcaggaatcttttggttttgggacgcctatatctccagttcctttaaattcattcagaactccaactgcgaatggaggaagaagtgcttgtgtgggtcattga

SEQ ID NO: 71 - DNA, 2112 bp, synthetic construct
  misc_feature 1..2112: note = Description of sequence: Mutant, Named: NtHAP1a mutant
  source 1..2112: mol_type = other DNA
atggatcaaggctttggttcagactctgttccaccagcagggtccattgacaagtctaaggttttagatgttaagcctatgagatgtcttatgcctgtttttccatccccaaatggaatgtcatctgtttcaactcctcaaccctcaccttttgtgtgtgttcctccaagtggtcctttcccacctggggtttctccgttttatccatttttggccccaaatggatccggaagatcaggtgaaaatcaggaatcttttggttttgggacgcctatatctccagttcctttaaattcattcagaactccaactgcgaatggagacactgggccaaggaggcccggcagacctcgtgctacgaatgtcttagctgcagaagatgatggtgtctctgattcacagaatcagagcgaccaattcggcagtggctatagcgtgcacgttaatgatgtagaagacacaagtacaggaaaaaaaaggggaagaccgagaaagactaggatgagtcatccagctaactcccatgtcgaagtggatgtcgatccaatactaaatcagctgcttgcgtcctttaaacttgtcgatgtcgatcaggttaagaaagctgatggtgataaggagctagttgggcgaatactattggcatttgatgtgtttcgtagaaggttgacccagattgatgagaaaaggggtgagactccaggttctgcaagaaggccggacctaaaggctgctaatttgctgatgacaaggggagctcggacaaatcagacaaagaggattggaaatgtacctgggattgaagttggtgacatattcttcttcaggatggaattgtgcctagttggtttgcatgcacctagtatggctgggatagattatatgagtgtcagacttacaggggatgaagagcctattgctgttagcatagtggcctctggaggatatgatgatgaaggggatgatggggatgtgctaatttatactggccagggtggagttcagagacgagatggccaaatgtttgatcagaaacttgagaggggtaatcttgctttggaaaagagtatgcatcgcggaaatgaggtgagagtaattaggggtgttatagatgttacaaatccgagggggaagatttatatgtatgatggcctttacaggatccaggaatcatgggcagagaaaagcaaattgggcgactgcagcattttcaggtacaaattgcttagagtacctgggcagcctgaagcatttacattgtggaaatcaattcagcaatggagggatggaacagcgacacgtgttggagttatcctacctgacctaacatctggtgcagagagtcaacctgtttgtcttgtaaatgatgttgatgatgagaagggacctgcttatttcacatatatccctagtctgaagtactcaaaaccttatatgaagcctaatccatccatgggttgtcaatgtgttggcggatgccaacctggagggtccacttgcccttgcattcagaaaaacggaggctttttgccctttagttcacttggagttcttgtgagttacaaaaccttgatacatgactgtggttctgcctgttcatgccctccgaattgccgaaatcgaatgtctcaagcaggtcctaaagcgcgtgtggaggtcttcaaaacaaaaaatagaggttggggacttaggtcttgggatcccatacgtggaggtggctttatttgtgaatatgccggagaagtcgttgaagagtctagggtaggtgagcttggcaatgacggtgacgatgattatatatttgatgctacccgcatgtatgagccattggaacctgtgcgtgattataacgatgtatcgaaaaaggtcccgtatccccttgtaataagtgcaaaaaagggtggcaatgttgctcgttttatgaaccatagttgttcacctaacgtattctggcagcttgttgtacgtgaaaataacaatgagacatactactacattgccttttttgccattaggcatattcctcccatgcaagaattgacttttgattatggcatggttcaccagacaaagcagatcgtaggaggaagaagtgcttgtgtgggtcattga

SEQ ID NO: 72 - DNA, 517 bp, synthetic construct
  misc_feature 1..517: note = Description of sequence: Mutant promoter, Named: NtHAP1a mutant promoter
  source 1..517: mol_type = other DNA
gtttgactgaaaatgcttgaatttctgatccatttgagacttattttgtttctgataatttttcattattttttttgtaaattatttttctttttattgtcattatactatgaagggttcctattacaaaatcttgagttgggtttagcttattttgtccttttgcatgttgttttttctaaattttggtggaatttttgctgggtttctagggttagctccatttagggcttgttcctgttcatttcccttaaattgtgagtttttatttggattttcagtcaacgtagccattcttgagcagaaagtttgcatctttagcctttttattggtgcatgatgtcctagaattgtattttttttaatggttttcttacttttttttcttgctgtagtaattggagattgtgcatggaatctaggtggtaacaggaaaaagtgcagagctttgtatttgggttattaatgtgagtgaaagctgtgatctttgttgttgtggctattgatttcgattgaa

SEQ ID NO: 73 - DNA, 603 bp, synthetic construct
  misc_feature 1..603: note = Description of sequence: Mutant promoter, Named: NtHAP1b mutant promoter
  source 1..603: mol_type = other DNA
cgcaatttttcttctaaagctctctgtgtgcttcaaagatcgttttcccaaatttgcccaggtacttatccatttcaagatcgtttcttttttgactgaaaatgtttgaatttctgatccatttgagacttattttgcttctggcaatttttctttaatttttttgtaaattatttttctttttattgtcattttactatgaagggttcctattacaaaatcttgagttgggtttagcttattttgtccttttgcatgttgttttttccttaattttggtggaattttttgctgggtttctagggttaactccattttagggcttgctcctgttcatttcccttaagttgtgagtttttttggattttcagtcaacatagccattcttgagcaatacatttgcatctttagccttttattggtgcatgatgtcctagaattgtatttttaatgggtttcttactttttttccttgctgtagtaattggagattgtgcatggattctaggtggtaactggaaaaagtgcagagctttgtatttgggttattaatgtgagtgaaagctgtggtctttgttgttgtggctattgattttgattgaa

SEQ ID NO: 74 - DNA, 603 bp, synthetic construct
  misc_feature 1..603: note = Description of sequence: Mutant promoter, Named: NtHAP1b mutant promoter
  source 1..603: mol_type = other DNA
cgcaatttttcttctaaagctctctgtgtgcttcaaagatcgttttcccaaatttgcccaggtacttatccatttcaagatcgtttcttttttgactgaaaatgtttgaatttctgatccatttgagacttattttgcttctggcaatttttctttaatttttttgtaaattatttttctttttattgtcattttactatgaagggttcctattacaaaatcttgagttgggtttagcttattttgtccttttgcatgttgttttttccttaattttggtggaattttttgctgggtttctagggttaactccattttagggcttgctcctgttcatttcccttaagttgtgagtttttttggattttcagtcaacatagccattcttgagcaatacatttgcatctttagccttttattggtgcatgatgtcctagaattgtatttttaatgggtttcttactttttttccttgctgtagtaattggagattgtgcatggaatctaggtggtaactggaaaaagtgcagagctttgtatttgggttattaatgtgagtgaaagctgtggtctttgttgttgtggctattgattttgattgaa

SEQ ID NO: 75 - DNA, 517 bp, synthetic construct
  misc_feature 1..517: note = Description of sequence: Mutant promoter, Named: NtHAP1a mutant promoter
  source 1..517: mol_type = other DNA
gtttgactgaaaatgcttgaatttctgatccatttgagacttattttgtttctgataatttttcattattttttttgtaaattatttttctttttattgtcattatactatgaagggttcctattacaaaatcttgagttgggtttagcttattttgtccttttgcatgttgttttttctaaattttggtggaatttttgctgggtttctagggttagctccatttagggcttgttcctgttcatttcccttaaattgtgagtttttatttggattttcagtcaacgtagccattcttgagcagaaagtttgcatctttagcctttttattggtgcatgatgtcctagaattgtattttttttaatggttttcttacttttttttcttgctgtagtaattggagattgtgcatggattctaggtggtaacaggaaaaagtgcagagctttgtatttgggttattaatgtgagtgaaagctgtgatctttgttgttgtggctattgatttcgattgaa

SEQ ID NO: 76 - DNA, 603 bp, synthetic construct; identical to SEQ ID NO: 74
  misc_feature 1..603: note = Description of sequence: Mutant promoter, Named: NtHAP1b mutant promoter
  source 1..603: mol_type = other DNA

SEQ ID NO: 77 - DNA, 517 bp, synthetic construct
  misc_feature 1..517: note = Description of sequence: Mutant promoter, Named: NtHAP1a mutant promoter
  source 1..517: mol_type = other DNA
gtttgactgaaaatgcttgaatttctgatccatttgagacttattttgtttctgataatttttcattattttttttgtaaattatttttctttttattgtcattatactatgaagggttcctattacaaaatcttgagttgggtttagcttattttgtccttttgcatgttgttttttctaaattttggtggaatttttgctgggtttctagggttagctccatttagggcttgttcctgttcatttcccttaaattgtgagtttttatttggattttcagtcaacgtagccattcttgagcagaaagtttgcatctttagcctttttattggtgcatgatgtcctagaattgtattttttttaatggttttcttacttttttttcttgctgtagtaattggagattgtgcatggactctaggtggtaacaggaaaaagtgcagagctttgtatttgggttattaatgtgagtgaaagctgtgatctttgttgttgtggctattgatttcgattgaa

SEQ ID NO: 78 - DNA, 572 bp, synthetic construct
  misc_feature 1..572: note = Description of sequence: Mutant promoter, Named: NtHAP1b mutant promoter
  source 1..572: mol_type = other DNA
cgcaatttttcttctaaagctctctgtgtgcttcaaagatcgttttcccaaatttgcccaggtacttatccatttcaagatcgtttcttttttgactgaaaatgtttgaatttctgatccatttgagacttattttgcttctggcaatttttctttaatttttttgtaaattatttttctttttattgtcattttactatgaagggttcctattacaaaatcttgagttgggtttagcttattttgtccttttgcatgttgttttttccttaattttggtggaattttttgctgggtttctagggttaactccattttagggcttgctcctgttcatttcccttaagttgtgagtttttttggattttcagtcaacatagccattcttgagcaatacatttgcatctttagccttttattggtgcatgatgtcctagaattgtatttttaatgggtttcttactttttttccttgctgtagtaattggagaaagtgcagagctttgtatttgggttattaatgtgagtgaaagctgtggtctttgttgttgtggctattgattttgattgaa

SEQ ID NO: 79 - DNA, 513 bp, synthetic construct
  misc_feature 1..513: note = Description of sequence: Mutant promoter, Named: NtHAP1a mutant promoter
  source 1..513: mol_type = other DNA
gtttgactgaaaatgcttgaatttctgatccatttgagacttattttgtttctgataatttttcattattttttttgtaaattatttttctttttattgtcattatactatgaagggttcctattacaaaatcttgagttgggtttagcttattttgtccttttgcatgttgttttttctaaattttggtggaatttttgctgggtttctagggttagctccatttagggcttgttcctgttcatttcccttaaattgtgagtttttatttggattttcagtcaacgtagccattcttgagcagaaagtttgcatctttagcctttttattggtgcatgatgtcctagaattgtattttttttaatggttttcttacttttttttcttgctgtagtaattggagattgtgcattctaggtggtaacaggaaaaagtgcagagctttgtatttgggttattaatgtgagtgaaagctgtgatctttgttgttgtggctattgatttcgattgaa

SEQ ID NO: 80 - DNA, 517 bp, synthetic construct; identical to SEQ ID NO: 75
  misc_feature 1..517: note = Description of sequence: Mutant promoter, Named: NtHAP1a mutant promoter
  source 1..517: mol_type = other DNA

SEQ ID NO: 81 - DNA, 572 bp, synthetic construct
  misc_feature 1..572: note = Description of sequence: Mutant promoter, Named: NtHAP1b mutant promoter
  source 1..572: mol_type = other DNA
cgcaatttttcttctaaagctctctgtgtgcttcaaagatcgttttcccaaatttgcccaggtacttatccatttcaagatcgtttcttttttgactgaaaatgtttgaatttctgatccatttgagacttattttgcttctggcaatttttctttaatttttttgtaaattatttttctttttattgtcattttactatgaagggttcctattacaaaatcttgagttgggtttagcttattttgtccttttgcatgttgttttttccttaattttggtggaattttttgctgggtttctagggttaactccattttagggcttgctcctgttcatttcccttaagttgtgagtttttttggattttcagtcaacatagccattcttgagcaatacatttgcatctttagccttttattggtgcatgatgtcctagaattgtatttttaatgggtttcttactttttttccttgctgtagtaattggagattgtgcagagctttgtatttgggttattaatgtgagtgaaagctgtggtctttgttgttgtggctattgattttgattgaa

SEQ ID NO: 82 - DNA, 603 bp, synthetic construct; identical to SEQ ID NO: 73
  misc_feature 1..603: note = Description of sequence: Mutant promoter, Named: NtHAP1b mutant promoter
  source 1..603: mol_type = other DNA

SEQ ID NO: 83 - DNA, 517 bp, synthetic construct; identical to SEQ ID NO: 72
  misc_feature 1..517: note = Description of sequence: Mutant promoter, Named: NtHAP1a mutant promoter
  source 1..517: mol_type = other DNA

SEQ ID NO: 84 - DNA, 603 bp, synthetic construct; identical to SEQ ID NO: 74
  misc_feature 1..603: note = Description of sequence: Mutant promoter, Named: NtHAP1b mutant promoter
  source 1..603: mol_type = other DNA

SEQ ID NO: 85 - DNA, 603 bp, synthetic construct; identical to SEQ ID NO: 73
  misc_feature 1..603: note = Description of sequence: Mutant promoter, Named: NtHAP1b mutant promoter
  source 1..603: mol_type = other DNA

SEQ ID NO: 86 - DNA, 513 bp, synthetic construct; identical to SEQ ID NO: 79
  misc_feature 1..513: note = Description of sequence: Mutant promoter, Named: NtHAP1a mutant promoter
  source 1..513: mol_type = other DNA

SEQ ID NO: 87 - DNA, 517 bp, synthetic construct; identical to SEQ ID NO: 75
  misc_feature 1..517: note = Description of sequence: Mutant promoter, Named: NtHAP1a mutant promoter
  source 1..517: mol_type = other DNA

SEQ ID NO: 88 - DNA, 572 bp, synthetic construct; identical to SEQ ID NO: 81
  misc_feature 1..572: note = Description of sequence: Mutant promoter, Named: NtHAP1b mutant promoter
  source 1..572: mol_type = other DNA

SEQ ID NO: 89 - DNA, 603 bp, synthetic construct; identical to SEQ ID NO: 73
  misc_feature 1..603: note = Description of sequence: Mutant promoter, Named: NtHAP1b mutant promoter
  source 1..603: mol_type = other DNA

SEQ ID NO: 90 - DNA, 30 bp, synthetic construct
  misc_feature 1..30: note = Description of sequence: Deletion fragment, Named: NtHAP1b deletion fragment
  source 1..30: mol_type = other DNA
attgtgcatggatctaggtggtaactggaa

SEQ ID NO: 91 - DNA, 30 bp, synthetic construct
  misc_feature 1..30: note = Description of sequence: Deletion fragment, Named: NtHAP1b deletion fragment
  source 1..30: mol_type = other DNA
gtgcatggatctaggtggtaactggaaaaa

SEQ ID NO: 92 - DNA, 30 bp, synthetic construct; identical to SEQ ID NO: 91
  misc_feature 1..30: note = Description of sequence: Deletion fragment, Named: NtHAP1b deletion fragment
  source 1..30: mol_type = other DNA

SEQ ID NO: 93 - DNA, 17 bp, synthetic construct
  misc_feature 1..17: note = Description of sequence: Deletion fragment, Named: NtHAP1a deletion fragment
  source 1..17: mol_type = other DNA
caccagacaaagcagat

SEQ ID NO: 94 - DNA, 53 bp, synthetic construct
  misc_feature 1..53: note = Description of sequence: Deletion fragment, Named: NtHAP1a deletion fragment
  source 1..53: mol_type = other DNA
cccatgcaagaattgacttttgattatggcatggttccaccagacaaagcaga

SEQ ID NO: 95 - DNA, 43 bp, synthetic construct
  misc_feature 1..43: note = Description of sequence: Deletion fragment, Named: NtHAP1a deletion fragment
  source 1..43: mol_type = other DNA
tcgtaggaggaagaagtgcttgtgtgggtcattgaactgcaga

SEQ ID NO: 96 - DNA, 41 bp, synthetic construct
  misc_feature 1..41: note = Description of sequence: Insertion fragment, Named: NtHAP1a insertion fragment
  source 1..41: mol_type = other DNA
ggttacttttatgcaagaattaccattaggcatattcctct

SEQ ID NO: 97 - protein, 647 aa, synthetic construct
  REGION 1..647: note = Description of sequence: Mutant, Named: NtHAP1a mutant
MDQGFGSDSVPPAGSIDKSKVLDVKPMRCLMPVFPSPNGMSSVSTPQPSPFVCVPPSGPFPPGVSPFYPFLAPNGSGRSGENQESFGFGTPISPVPLNSFRTPTANGDTGPRRPGRPRATNVLAAEDDGVSDSQNQSDQFGSGYSVHVNDVEDTSTGKKRGRPRKTRMSHPANSHVEVDVDPILNQLLASFKLVDVDQVKKADGDKELVGRILLAFDVFRRRLTQIDEKRGETPGSARRPDLKAANLLMTRGARTNQTKRIGNVPGIEVGDIFFFRMELCLVGLHAPSMAGIDYMSVRLTGDEEPIAVSIVASGGYDDEGDDGDVLIYTGQGGVQRRDGQMFDQKLERGNLALEKSMHRGNEVRVIRGVIDVTNPRGKIYMYDGLYRIQESWAEKSKLGDCSIFRYKLLRVPGQPEAFTLWKSIQQWRDGTATRVGVILPDLTSGAESQPVCLVNDVDDEKGPAYFTYIPSLKYSKPYMKPNPSMGCQCVGGCQPGGSTCPCIQKNGGFLPFSSLGVLVSYKTLIHDCGSACSCPPNCRNRMSQAGPKARVEVFKTKNRGWGLRSWDPIRGGGFICEYAGEVVEESRVGELGNDGDDDYIFDATRMYEPLEPVRDYNDVSKKVPYPLVISAKKGGNVARFMNHRLFT

SEQ ID NO: 98 - protein, 647 aa, synthetic construct
  REGION 1..647: note = Description of sequence: Mutant, Named: NtHAP1a mutant
MDQGFGSDSVPPAGSIDKSKVLDVKPMRCLMPVFPSPNGMSSVSTPQPSPFVCVPPSGPFPPGVSPFYPFLAPNGSGRSGENQESFGFGTPISPVPLNSFRTPTANGDTGPRRPGRPRATNVLAAEDDGVSDSQNQSDQFGSGYSVHVNDVEDTSTGKKRGRPRKTRMSHPANSHVEVDVDPILNQLLASFKLVDVDQVKKADGDKELVGRILLAFDVFRRRLTQIDEKRGETPGSARRPDLKAANLLMTRGARTNQTKRIGNVPGIEVGDIFFFRMELCLVGLHAPSMAGIDYMSVRLTGDEEPIAVSIVASGGYDDEGDDGDVLIYTGQGGVQRRDGQMFDQKLERGNLALEKSMHRGNEVRVIRGVIDVTNPRGKIYMYDGLYRIQESWAEKSKLGDCSIFRYKLLRVPGQPEAFTLWKSIQQWRDGTATRVGVILPDLTSGAESQPVCLVNDVDDEKGPAYFTYIPSLKYSKPYMKPNPSMGCQCVGGCQPGGSTCPCIQKNGGFLPFSSLGVLVSYKTLIHDCGSACSCPPNCRNRMSQAGPKARVEVFKTKNRGWGLRSWDPIRGGGFICEYAGEVVEESRVGELGNDGDDDYIFDATRMYEPLEPVRDYNDVSKKVPYPLVISAKKGGNVARFMNHSLFT

SEQ ID NO: 99 - protein, 647 aa, synthetic construct
  REGION 1..647: note = Description of sequence: Mutant, Named: NtHAP1b mutant
MEQGFGSDSVPPAGSIDKSKVLDVKPMRCLMPVFPSPNGMSSVSTPQPSPFVCVPPSGPFPTGVSPFYPFLAPNAAARSGENHEAFGFGTPISPVPLNSFRTPTANGDTGPRRPGRPRATNGLVAEDDGVSDSQNQSDQFGSGYSVHVNDVEDTSTGKKRGRPRKTRMSHPANSHVEVDVDPILNQLLASFKLVEFDQAKKADGDKELVGRILLAFDVFRRRLTQIDEKRGETPGSARRPDLKAANLLMTKGARTNQTKRVGNVPGIEVGDIFFFRMELCLVGLHAPSMAGIDYMSVRLTGDEEPIAVSIVASGGYDDEGDDGDVLIYTGQGGVQRRDGQMFDQKLERGNLALEKSMHRGNEVRVIRGVIDVTNPRGKIYMYDGLYRIQESWAEKSKLGDCSIFRYKLLRVPGQPEAFTLWKSIQQWRDGTATRVGVILPDLTSGAESQPVCLVNDVDDEKGPAYFTYIPSLKYSKPYMKPNPSMGCQCVGGCQPGGSACPCIQKNGGFLPFSSLGVLVSYKTLIHECGSACSCPPNCRNRMSQTGPKARVEVFKTKNRGWGLRSWDPIRGGGFMCEYAGEVVEESRVGELGNDGDDDYIFDATRMYEPLEPVRDYNDESKKVPYPLVISAKKGGNVARFMNHSLFT

SEQ ID NO: 100 - protein, 679 aa, synthetic construct
  REGION 1..679: note = Description of sequence: Mutant, Named: NtHAP1a mutant
MDQGFGSDSVPPAGSIDKSKVLDVKPMRCLMPVFPSPNGMSSVSTPQPSPFVCVPPSGPFPPGVSPFYPFLAPNGSGRSGENQESFGFGTPISPVPLNSFRTPTANGDTGPRRPGRPRATNVLAAEDDGVSDSQNQSDQFGSGYSVHVNDVEDTSTGKKRGRPRKTRMSHPANSHVEVDVDPILNQLLASFKLVDVDQVKKADGDKELVGRILLAFDVFRRRLTQIDEKRGETPGSARRPDLKAANLLMTRGARTNQTKRIGNVPGIEVGDIFFFRMELCLVGLHAPSMAGIDYMSVRLTGDEEPIAVSIVASGGYDDEGDDGDVLIYTGQGGVQRRDGQMFDQKLERGNLALEKSMHRGNEVRVIRGVIDVTNPRGKIYMYDGLYRIQESWAEKSKLGDCSIFRYKLLRVPGQPEAFTLWKSIQQWRDGTATRVGVILPDLTSGAESQPVCLVNDVDDEKGPAYFTYIPSLKYSKPYMKPNPSMGCQCVGGCQPGGSTCPCIQKNGGFLPFSSLGVLVSYKTLIHDCGSACSCPPNCRNRMSQAGPKARVEVFKTKNRGWGLRSWDPIRGGGFICEYAGEVVEESRVGELGNDGDDDYIFDATRMYEPLEPVRDYNDVSKKVPYPLVISAKKGGNVARFMNHSVHLTYSGSLLYVKITMRHTTTLPFLPLGIFLPCKN

SEQ ID NO: 101 - protein, 640 aa, synthetic construct
  REGION 1..640: note = Description of sequence: Mutant, Named: NtHAP1b mutant
MEQGFGSDSVPPAGSIDKSKVLDVKPMRCLMPVFPSPNGMSSVSTPQPSPFVCVPPSGPFPTGVSPFYPFLAPNAAARSGENHEAFGFGTPISPVPLNSFRTPTANGDTGPRRPGRPRATNGLVAEDDGVSDSQNQSDQFGSGYSVHVNDVEDTSTGKKRGRPRKTRMSHPANSHVEVDVDPILNQLLASFKLVEFDQAKKADGDKELVGRILLAFDVFRRRLTQIDEKRGETPGSARRPDLKAANLLMTKGARTNQTKRVGNVPGIEVGDIFFFRMELCLVGLHAPSMAGIDYMSVRLTGDEEPIAVSIVASGGYDDEGDDGDVLIYTGQGGVQRRDGQMFDQKLERGNLALEKSMHRGNEVRVIRGVIDVTNPRGKIYMYDGLYRIQESWAEKSKLGDCSIFRYKLLRVPGQPEAFTLWKSIQQWRDGTATRVGVILPDLTSGAESQPVCLVNDVDDEKGPAYFTYIPSLKYSKPYMKPNPSMGCQCVGGCQPGGSACPCIQKNGGFLPFSSLGVLVSYKTLIHECGSACSCPPNCRNRMSQTGPKARVEVFKTKNRGWGLRSWDPIRGGGFMCEYAGEVVEESRVGELGNDGDDDYIFDATRMYEPLEPVRDYNDESKKVPYPLVIMQKRVAMLLVL

SEQ ID NO: 102 - protein, 647 aa, synthetic construct; identical to SEQ ID NO: 99
  REGION 1..647: note = Description of sequence: Mutant, Named: NtHAP1b mutant

SEQ ID NO: 103 - protein, 647 aa, synthetic construct; identical to SEQ ID NO: 98
  REGION 1..647: note = Description of sequence: Mutant, Named: NtHAP1a mutant

SEQ ID NO: 104 - protein, 647 aa, synthetic construct; identical to SEQ ID NO: 99
  REGION 1..647: note = Description of sequence: Mutant, Named: NtHAP1b mutant

SEQ ID NO: 105 - protein, 679 aa, synthetic construct; identical to SEQ ID NO: 100
  REGION 1..679: note = Description of sequence: Mutant, Named: NtHAP1a mutant

SEQ ID NO: 106 - protein, 647 aa, synthetic construct; identical to SEQ ID NO: 99
  REGION 1..647: note = Description of sequence: Mutant, Named: NtHAP1b mutant

SEQ ID NO: 107 - protein, 647 aa, synthetic construct; identical to SEQ ID NO: 98
  REGION 1..647: note = Description of sequence: Mutant, Named: NtHAP1a mutant

SEQ ID NO: 108 - protein, 679 aa, synthetic construct
  REGION 1..679: note = Description of sequence: Mutant, Named: NtHAP1b mutant
MEQGFGSDSVPPAGSIDKSKVLDVKPMRCLMPVFPSPNGMSSVSTPQPSPFVCVPPSGPFPTGVSPFYPFLAPNAAARSGENHEAFGFGTPISPVPLNSFRTPTANGDTGPRRPGRPRATNGLVAEDDGVSDSQNQSDQFGSGYSVHVNDVEDTSTGKKRGRPRKTRMSHPANSHVEVDVDPILNQLLASFKLVEFDQAKKADGDKELVGRILLAFDVFRRRLTQIDEKRGETPGSARRPDLKAANLLMTKGARTNQTKRVGNVPGIEVGDIFFFRMELCLVGLHAPSMAGIDYMSVRLTGDEEPIAVSIVASGGYDDEGDDGDVLIYTGQGGVQRRDGQMFDQKLERGNLALEKSMHRGNEVRVIRGVIDVTNPRGKIYMYDGLYRIQESWAEKSKLGDCSIFRYKLLRVPGQPEAFTLWKSIQQWRDGTATRVGVILPDLTSGAESQPVCLVNDVDDEKGPAYFTYIPSLKYSKPYMKPNPSMGCQCVGGCQPGGSACPCIQKNGGFLPFSSLGVLVSYKTLIHECGSACSCPPNCRNRMSQTGPKARVEVFKTKNRGWGLRSWDPIRGGGFMCEYAGEVVEESRVGELGNDGDDDYIFDATRMYEPLEPVRDYNDESKKVPYPLVISAKKGGNVARFMNHSVHLTYSGSLLYVKITMRHTTTLPFLPLGIFLPCKN

SEQ ID NO: 109 - protein, 647 aa, synthetic construct; identical to SEQ ID NO: 97
  REGION 1..647: note = Description of sequence: Mutant, Named: NtHAP1a mutant

SEQ ID NO: 110 - protein, 647 aa, synthetic construct; identical to SEQ ID NO: 98
  REGION 1..647: note = Description of sequence: Mutant, Named: NtHAP1a mutant

SEQ ID NO: 111 - protein, 647 aa, synthetic construct; identical to SEQ ID NO: 99
  REGION 1..647: note = Description of sequence: Mutant, Named: NtHAP1b mutant

SEQ ID NO: 112 - protein, 647 aa, synthetic construct; identical to SEQ ID NO: 97
  REGION 1..647: note = Description of sequence: Mutant, Named: NtHAP1a mutant

SEQ ID NO: 113 - protein, 647 aa, synthetic construct; identical to SEQ ID NO: 98
  REGION 1..647: note = Description of sequence: Mutant, Named: NtHAP1a mutant

SEQ ID NO: 114 - protein, 7 aa, synthetic construct
  REGION 1..7: note = Description of sequence: Mutant, Named: NtHAP2 mutant
MEQGLRS

SEQ ID NO: 115 - protein, 7 aa, synthetic construct
  REGION 1..7: note = Description of sequence: Mutant, Named: NtHAP2 mutant
MEQGLRS

SEQ ID NO: 116 - protein, 646 aa, synthetic construct
  REGION 1..646: note = Description of sequence: Mutant, Named: NtHAP1a mutant
MDQGFGSDSVPPAGSIDKSKVLDVKPMRCLMPVFPSPNGMSSVSTPQPSPFVCVPPSGPFPPGVSPFYPFLAPNGSGRSGENQESFGFGTPISPVPLNSFRTPTANGDTGPRRPGRPRATNVLAAEDDGVSDSQNQSDQFGSGYSVHVNDVEDTSTGKKRGRPRKTRMSHPANSHVEVDVDPILNQLLASFKLVDVDQVKKADGDKELVGRILLAFDVFRRRLTQIDEKRGETPGSARRPDLKAANLLMTRGARTNQTKRIGNVPGIEVGDIFFFRMELCLVGLHAPSMAGIDYMSVRLTGDEEPIAVSIVASGGYDDEGDDGDVLIYTGQGGVQRRDGQMFDQKLERGNLALEKSMHRGNEVRVIRGVIDVTNPRGKIYMYDGLYRIQESWAEKSKLGDCSIFRYKLLRVPGQPEAFTLWKSIQQWRDGTATRVGVILPDLTSGAESQPVCLVNDVDDEKGPAYFTYIPSLKYSKPYMKPNPSMGCQCVGGCQPGGSTCPCIQKNGGFLPFSSLGVLVSYKTLIHDCGSACSCPPNCRNRMSQAGPKARVEVFKTKNRGWGLRSWDPIRGGGFICEYAGEVVEESRVGELGNDGDDDYIFDATRMYEPLEPVRDYNDVSKKVPYPLVISAKKGGNVARFMNHRFT

SEQ ID NO: 117 - protein, 647 aa, synthetic construct
  REGION 1..647: note = Description of sequence: Mutant, Named: NtHAP1b mutant
MEQGFGSDSVPPAGSIDKSKVLDVKPMRCLMPVFPSPNGMSSVSTPQPSPFVCVPPSGPFPTGVSPFYPFLAPNAAARSGENHEAFGFGTPISPVPLNSFRTPTANGDTGPRRPGRPRATNGLVAEDDGVSDSQNQSDQFGSGYSVHVNDVEDTSTGKKRGRPRKTRMSHPANSHVEVDVDPILNQLLASFKLVEFDQAKKADGDKELVGRILLAFDVFRRRLTQIDEKRGETPGSARRPDLKAANLLMTKGARTNQTKRVGNVPGIEVGDIFFFRMELCLVGLHAPSMAGIDYMSVRLTGDEEPIAVSIVASGGYDDEGDDGDVLIYTGQGGVQRRDGQMFDQKLERGNLALEKSMHRGNEVRVIRGVIDVTNPRGKIYMYDGLYRIQESWAEKSKLGDCSIFRYKLLRVPGQPEAFTLWKSIQQWRDGTATRVGVILPDLTSGAESQPVCLVNDVDDEKGPAYFTYIPSLKYSKPYMKPNPSMGCQCVGGCQPGGSACPCIQKNGGFLPFSSLGVLVSYKTLIHECGSACSCPPNCRNRMSQTGPKARVEVFKTKNRGWGLRSWDPIRGGGFMCEYAGEVVEESRVGELGNDGDDDYIFDATRMYEPLEPVRDYNDESKKVPYPLVISAKKGGNVARFMNHRLFT

SEQ ID NO: 118 - protein, 647 aa, synthetic construct; identical to SEQ ID NO: 99
  REGION 1..647: note = Description of sequence: Mutant, Named: NtHAP1b mutant

SEQ ID NO: 119 - protein, 22 aa, synthetic construct
  REGION 1..22: note = Description of sequence: Mutant, Named: NtHAP2 mutant
MEQGLRLRVIILRASIRLGFWM

SEQ ID NO: 120 - protein, 647 aa, synthetic construct; identical to SEQ ID NO: 97
  REGION 1..647: note = Description of sequence: Mutant, Named: NtHAP1a mutant

SEQ ID NO: 121 - protein, 647 aa, synthetic construct; identical to SEQ ID NO: 98
  REGION 1..647: note = Description of sequence: Mutant, Named: NtHAP1a mutant

SEQ ID NO: 122 - protein, 7 aa, synthetic construct
  REGION 1..7: note = Description of sequence: Mutant, Named: NtHAP2 mutant
MEQGLRS

SEQ ID NO: 123 - protein, 7 aa, synthetic construct
  REGION 1..7: note = Description of sequence: Mutant, Named: NtHAP2 mutant
MEQGLRS

SEQ ID NO: 124 - protein, 695 aa, synthetic construct
  REGION 1..695: note = Description of sequence: Mutant, Named: NtHAP1a mutant
MDQGFGSDSVPPAGSIDKSKVLDVKPMRCLMPVFPSPNGMSSVSTPQPSPFVCVPPSGPFPPGVSPFYPFLAPNGSGRSGENQESFGFGTPISPVPLNSFRTPTANGDTGPRRPGRPRATNVLAAEDDGVSDSQNQSDQFGSGYSVHVNDVEDTSTGKKRGRPRKTRMSHPANSHVEVDVDPILNQLLASFKLVDVDQVKKADGDKELVGRILLAFDVFRRRLTQIDEKRGETPGSARRPDLKAANLLMTRGARTNQTKRIGNVPGIEVGDIFFFRMELCLVGLHAPSMAGIDYMSVRLTGDEEPIAVSIVASGGYDDEGDDGDVLIYTGQGGVQRRDGQMFDQKLERGNLALEKSMHRGNEVRVIRGVIDVTNPRGKIYMYDGLYRIQESWAEKSKLGDCSIFRYKLLRVPGQPEAFTLWKSIQQWRDGTATRVGVILPDLTSGAESQPVCLVNDVDDEKGPAYFTYIPSLKYSKPYMKPNPSMGCQCVGGCQPGGSTCPCIQKNGGFLPFSSLGVLVSYKTLIHDCGSACSCPPNCRNRMSQAGPKARVEVFKTKNRGWGLRSWDPIRGGGFICEYAGEVVEESRVGELGNDGDDDYIFDATRMYEPLEPVRDYNDVSKKVPYPLVISAKKGGNVARFMNHSCSPNVFWQLVVRENNNETYYYIAFFAIRHIPPMQELTFDYSVGGRSACVGH

SEQ ID NO: 125 - protein, 695 aa, synthetic construct; identical to SEQ ID NO: 124
  REGION 1..695: note = Description of sequence: Mutant, Named: NtHAP1a mutant

SEQ ID NO: 126 - protein, 694 aa, synthetic construct
  REGION 1..694: note = Description of sequence: Mutant, Named: NtHAP1a mutant
MDQGFGSDSVPPAGSIDKSKVLDVKPMRCLMPVFPSPNGMSSVSTPQPSPFVCVPPSGPFPPGVSPFYPFLAPNGSGRSGENQESFGFGTPISPVPLNSFRTPTANGDTGPRRPGRPRATNVLAAEDDGVSDSQNQSDQFGSGYSVHVNDVEDTSTGKKRGRPRKTRMSHPANSHVEVDVDPILNQLLASFKLVDVDQVKKADGDKELVGRILLAFDVFRRRLTQIDEKRGETPGSARRPDLKAANLLMTRGARTNQTKRIGNVPGIEVGDIFFFRMELCLVGLHAPSMAGIDYMSVRLTGDEEPIAVSIVASGGYDDEGDDGDVLIYTGQGGVQRRDGQMFDQKLERGNLALEKSMHRGNEVRVIRGVIDVTNPRGKIYMYDGLYRIQESWAEKSKLGDCSIFRYKLLRVPGQPEAFTLWKSIQQWRDGTATRVGVILPDLTSGAESQPVCLVNDVDDEKGPAYFTYIPSLKYSKPYMKPNPSMGCQCVGGCQPGGSTCPCIQKNGGFLPFSSLGVLVSYKTLIHDCGSACSCPPNCRNRMSQAGPKARVEVFKTKNRGWGLRSWDPIRGGGFICEYAGEVVEESRVGELGNDGDDDYIFDATRMYEPLEPVRDYNDVSKKVPYPLVISAKKGGNVARFMNHSCSPNVFWQLVVRENNNETYYYIAFFAIRHIPPMQELTFDYGMVPPDKADS

SEQ ID NO: 127 - protein, 694 aa, synthetic construct; identical to SEQ ID NO: 126
  REGION 1..694: note = Description of sequence: Mutant, Named: NtHAP1a mutant

SEQ ID NO: 128 - protein, 717 aa, synthetic construct
  REGION 1..717: note = Description of sequence: Mutant, Named: NtHAP1a mutant
MDQGFGSDSVPPAGSIDKSKVLDVKPMRCLMPVFPSPNGMSSVSTPQPSPFVCVPPSGPFPPGVSPFYPFLAPNGSGRSGENQESFGFGTPISPVPLNSFRTPTANGDTGPRRPGRPRATNVLAAEDDGVSDSQNQSDQFGSGYSVHVNDVEDTSTGKKRGRPRKTRMSHPANSHVEVDVDPILNQLLASFKLVDVDQVKKADGDKELVGRILLAFDVFRRRLTQIDEKRGETPGSARRPDLKAANLLMTRGARTNQTKRIGNVPGIEVGDIFFFRMELCLVGLHAPSMAGIDYMSVRLTGDEEPIAVSIVASGGYDDEGDDGDVLIYTGQGGVQRRDGQMFDQKLERGNLALEKSMHRGNEVRVIRGVIDVTNPRGKIYMYDGLYRIQESWAEKSKLGDCSIFRYKLLRVPGQPEAFTLWKSIQQWRDGTATRVGVILPDLTSGAESQPVCLVNDVDDEKGPAYFTYIPSLKYSKPYMKPNPSMGCQCVGGCQPGGSTCPCIQKNGGFLPFSSLGVLVSYKTLIHDCGSACSCPPNCRNRMSQAGPKARVEVFKTKNRGWGLRSWDPIRGGGFICEYAGEVVEESRVGELGNDGDDDYIFDATRMYEPLEPVRDYNDVSKKVPYPLVISAKKGGNVARFMNHSCSPNVFWQLVVRENNNETYYYIAFFAIRHIPPMQELTFDYGMVPPDKAEVTFMQELPLGIFLFVGGRSACVGH

SEQ ID NO: 129 - protein, 693 aa, synthetic construct
  REGION 1..693: note = Description of sequence: Mutant, Named: NtHAP1a mutant
MDQGFGSDSVPPAGSIDKSKVLDVKPMRCLMPVFPSPNGMSSVSTPQPSPFVCVPPSGPFPPGVSPFYPFLAPNGSGRSGENQESFGFGTPISPVPLNSFRTPTANGDTGPRRPGRPRATNVLAAEDDGVSDSQNQSDQFGSGYSVHVNDVEDTSTGKKRGRPRKTRMSHPANSHVEVDVDPILNQLLASFKLVDVDQVKKADGDKELVGRILLAFDVFRRRLTQIDEKRGETPGSARRPDLKAANLLMTRGARTNQTKRIGNVPGIEVGDIFFFRMELCLVGLHAPSMAGIDYMSVRLTGDEEPIAVSIVASGGYDDEGDDGDVLIYTGQGGVQRRDGQMFDQKLERGNLALEKSMHRGNEVRVIRGVIDVTNPRGKIYMYDGLYRIQESWAEKSKLGDCSIFRYKLLRVPGQPEAFTLWKSIQQWRDGTATRVGVILPDLTSGAESQPVCLVNDVDDEKGPAYFTYIPSLKYSKPYMKPNPSMGCQCVGGCQPGGSTCPCIQKNGGFLPFSSLGVLVSYKTLIHDCGSACSCPPNCRNRMSQAGPKARVEVFKTKNRGWGLRSWDPIRGGGFICEYAGEVVEESRVGELGNDGDDDYIFDATRMYEPLEPVRDYNDVSKKVPYPLVISAKKGGNVARFMNHSCSPNVFWQLVVRENNNETYYYIAFFAIRHILRRRKKCLCGSLNCRGYFY

SEQ ID NO: 130 - protein, 694 aa, synthetic construct
  REGION 1..694: note = Description of sequence: Mutant, Named: NtHAP1a mutant
MDQGFGSDSVPPAGSIDKSKVLDVKPMRCLMPVFPSPNGMSSVSTPQPSPFVCVPPSGPFPPGVSPFYPFLAPNGSGRSGENQESFGFGTPISPVPLNSFRTPTANGDTGPRRPGRPRATNVLAAEDDGVSDSQNQSDQFGSGYSVHVNDVEDTSTGKKRGRPRKTRMSHPANSHVEVDVDPILNQLLASFKLVDVDQVKKADGDKELVGRILLAFDVFRRRLTQIDEKRGETPGSARRPDLKAANLLMTRGARTNQTKRIGNVPGIEVGDIFFFRMELCLVGLHAPSMAGIDYMSVRLTGDEEPIAVSIVASGGYDDEGDDGDVLIYTGQGGVQRRDGQMFDQKLERGNLALEKSMHRGNEVRVIRGVIDVTNPRGKIYMYDGLYRIQESWAEKSKLGDCSIFRYKLLRVPGQPEAFTLWKSIQQWRDGTATRVGVILPDLTSGAESQPVCLVNDVDDEKGPAYFTYIPSLKYSKPYMKPNPSMGCQCVGGCQPGGSTCPCIQKNGGFLPFSSLGVLVSYKTLIHDCGSACSCPPNCRNRMSQAGPKARVEVFKTKNRGWGLRSWDPIRGGGFICEYAGEVVEESRVGELGNDGDDDYIFDATRMYEPLEPVRDYNDVSKKVPYPLVISAKKGGNVARFMNHSCSPNVFWQLVVRENNNETYYYIAFFAIRHIPPMQELTFDYGMVPPDKADT

SEQ ID NO: 131 - protein, 703 aa, synthetic construct
  REGION 1..703: note = Description of sequence: Mutant, Named: NtHAP1a mutant
MDQGFGSDSVPPAGSIDKSKVLDVKPMRCLMPVFPSPNGMSSVSTPQPSPFVCVPPSGPFPPGVSPFYPFLAPNGSGRSGENQESFGFGTPISPVPLNSFRTPTANGDTGPRRPGRPRATNVLAAEDDGVSDSQNQSDQFGSGYSVHVNDVEDTSTGKKRGRPRKTRMSHPANSHVEVDVDPILNQLLASFKLVDVDQVKKADGDKELVGRILLAFDVFRRRLTQIDEKRGETPGSARRPDLKAANLLMTRGARTNQTKRIGNVPGIEVGDIFFFRMELCLVGLHAPSMAGIDYMSVRLTGDEEPIAVSIVASGGYDDEGDDGDVLIYTGQGGVQRRDGQMFDQKLERGNLALEKSMHRGNEVRVIRGVIDVTNPRGKIYMYDGLYRIQESWAEKSKLGDCSIFRYKLLRVPGQPEAFTLWKSIQQWRDGTATRVGVILPDLTSGAESQPVCLVNDVDDEKGPAYFTYIPSLKYSKPYMKPNPSMGCQCVGGCQPGGSTCPCIQKNGGFLPFSSLGVLVSYKTLIHDCGSACSCPPNCRNRMSQAGPKARVEVFKTKNRGWGLRSWDPIRGGGFICEYAGEVVEESRVGELGNDGDDDYIFDATRMYEPLEPVRDYNDVSKKVPYPLVISAKKGGNVARFMNHSCSPNVFWQLVVRENNNETYYYIAFFAIRHIPPMQELTFDYGMVPPDKAVVGGRSACVGH

SEQ ID NO: 132 - protein, 712 aa, synthetic construct
  REGION 1..712: note = Description of sequence: Mutant, Named: NtHAP1a mutant
MDQGFGSDSVPPAGSIDKSKVLDVKPMRCLMPVFPSPNGMSSVSTPQPSPFVCVPPSGPFPPGVSPFYPFLAPNGSGRSGENQESFGFGTPISPVPLNSFRTPTANGDTGPRRPGRPRATNVLAAEDDGVSDSQNQSDQFGSGYSVHVNDVEDTSTGKKRGRPRKTRMSHPANSHVEVDVDPILNQLLASFKLVDVDQVKKADGDKELVGRILLAFDVFRRRLTQIDEKRGETPGSARRPDLKAANLLMTRGARTNQTKRIGNVPGIEVGDIFFFRMELCLVGLHAPSMAGIDYMSVRLTGDEEPIAVSIVASGGYDDEGDDGDVLIYTGQGGVQRRDGQMFDQKLERGNLALEKSMHRGNEVRVIRGVIDVTNPRGKIYMYDGLYRIQESWAEKSKLGDCSIFRYKLLRVPGQPEAFTLWKSIQQWRDGTATRVGVILPDLTSGAESQPVCLVNDVDDEKGPAYFTYIPSLKYSKPYMKPNPSMGCQCVGGCQPGGSTCPCIQKNGGFLPFSSLGVLVSYKTLIHDCGSACSCPPNCRNRMSQAGPKARVEVFKTKNRGWGLRSWDPIRGGGFICEYAGEVVEESRVGELGNDGDDDYIFDATRMYEPLEPVRDYNDVSKKVPYPLVISAKKGGNVARFMNHSCSPNVFWQLVVRENNNETYYYIAFFAIRHIPPMQELTFDYGMVPPDKAEVTFTSCHGLMKEMKFTGHH

SEQ ID NO: 133 - protein, 115 aa, synthetic construct
  REGION 1..115: note = Description of sequence: Mutant, Named: NtHAP1a mutant
MDQGFGSDSVPPAGSIDKSKVLDVKPMRCLMPVFPSPNGMSSVSTPQPSPFVCVPPSGPFPPGVSPFYPFLAPNGSGRSGENQESFGFGTPISPVPLNSFRTPTANGGRSACVGH

SEQ ID NO: 134 - protein, 703 aa, synthetic construct
  REGION 1..703: note = Description of sequence: Mutant, Named: NtHAP1a mutant
MDQGFGSDSVPPAGSIDKSKVLDVKPMRCLMPVFPSPNGMSSVSTPQPSPFVCVPPSGPFPPGVSPFYPFLAPNGSGRSGENQESFGFGTPISPVPLNSFRTPTANGDTGPRRPGRPRATNVLAAEDDGVSDSQNQSDQFGSGYSVHVNDVEDTSTGKKRGRPRKTRMSHPANSHVEVDVDPILNQLLASFKLVDVDQVKKADGDKELVGRILLAFDVFRRRLTQIDEKRGETPGSARRPDLKAANLLMTRGARTNQTKRIGNVPGIEVGDIFFFRMELCLVGLHAPSMAGIDYMSVRLTGDEEPIAVSIVASGGYDDEGDDGDVLIYTGQGGVQRRDGQMFDQKLERGNLALEKSMHRGNEVRVIRGVIDVTNPRGKIYMYDGLYRIQESWAEKSKLGDCSIFRYKLLRVPGQPEAFTLWKSIQQWRDGTATRVGVILPDLTSGAESQPVCLVNDVDDEKGPAYFTYIPSLKYSKPYMKPNPSMGCQCVGGCQPGGSTCPCIQKNGGFLPFSSLGVLVSYKTLIHDCGSACSCPPNCRNRMSQAGPKARVEVFKTKNRGWGLRSWDPIRGGGFICEYAGEVVEESRVGELGNDGDDDYIFDATRMYEPLEPVRDYNDVSKKVPYPLVISAKKGGNVARFMNHSCSPNVFWQLVVRENNNETYYYIAFFAIRHIPPMQELTFDYGMVHQTKQIVGGRSACVGH

SEQ ID NO: 135 - DNA, 1944 bp, synthetic construct; identical to SEQ ID NO: 35
  misc_feature 1..1944: note = Description of sequence: Mutant, Named: NtHAP1a mutant
  source 1..1944: mol_type = other DNA

SEQ ID NO: 136 - DNA, 2019 bp, synthetic construct
  misc_feature 1..2019: note = Description of sequence: Mutant, Named: NtHAP1a mutant
  source 1..2019: mol_type = other DNA
atggatcaaggctttggttcagactctgttccaccagcagggtccattgacaagtctaaggttttagatgttaagcctatgagatgtcttatgcctgtttttccatccccaaatggaatgtcatctgtttcaactcctcaaccctcaccttttgtgtgtgttcctccaagtggtcctttcccacctggggtttctccgttttatccatttttggccccaaatggatccggaagatcaggtgaaaatcaggaatcttttggttttgggacgcctatatctccagttcctttaaattcattcagaactccaactgcgaatggagacactgggccaaggaggcccggcagacctcgtgctacgaatgtcttagctgcagaagatgatggtgtctctgattcacagaatcagagcgaccaattcggcagtggctatagcgtgcacgttaatgatgtagaagacacaagtacaggaaaaaaaaggggaagaccgagaaagactaggatgagtcatccagctaactcccatgtcgaagtggatgtcgatccaatactaaatcagctgcttgcgtcctttaaacttgtcgatgtcgatcaggttaagaaagctgatggtgataaggagctagttgggcgaatactattggcatttgatgtgtttcgtagaaggttgacccagattgatgagaaaaggggtgagactccaggttctgcaagaaggccggacctaaaggctgctaatttgctgatgacaaggggagctcggacaaatcagacaaagaggattggaaatgtacctgggattgaagttggtgacatattcttcttcaggatggaattgtgcctagttggtttgcatgcacctagtatggctgggatagattatatgagtgtcagacttacaggggatgaagagcctattgctgttagcatagtggcctctggaggatatgatgatgaaggggatgatggggatgtgctaatttatactggccagggtggagttcagagacgagatggccaaatgtttgatcagaaacttgagaggggtaatcttgctttggaaaagagtatgcatcgcggaaatgaggtgagagtaattaggggtgttatagatgttacaaatccgagggggaagatttatatgtatgatggcctttacaggatccaggaatcatgggcagagaaaagcaaattgggcgactgcagcattttcaggtacaaattgcttagagtacctgggcagcctgaagcatttacattgtggaaatcaattcagcaatggagggatggaacagcgacacgtgttggagttatcctacctgacctaacatctggtgcagagagtcaacctgtttgtcttgtaaatgatgttgatgatgagaagggacctgcttatttcacatatatccctagtctgaagtactcaaaaccttatatgaagcctaatccatccatgggttgtcaatgtgttggcggatgccaacctggagggtccacttgcccttgcattcagaaaaacggaggctttttgccctttagttcacttggagttcttgtgagttacaaaaccttgatacatgactgtggttctgcctgttcatgccctccgaattgccgaaatcgaatgtctcaagcaggtcctaaagcgcgtgtggaggtcttcaaaacaaaaaatagaggttggggacttaggtcttgggatcccatacgtggaggtggctttatttgtgaatatgccggagaagtcgttgaagagtctagggtaggtgagcttggcaatgacggtgacgatgattatatatttgatgctacccgcatgtatgagccattggaacctgtgcgtgattataacgatgtatcgaaaaaggtcccgtatccccttgtaataagtgcaaaaaagggtggcaatgttgttcacctaacgtattctggcagcttgttgtacgtgaaaataacaatgagacatactactacattgccttttttgccattaggcatattcctcccatgcaagaattga

SEQ ID NO: 137 - DNA, 1944 bp, synthetic construct; identical to SEQ ID NO: 34
  misc_feature 1..1944: note = Description of sequence: Mutant, Named: NtHAP1a mutant
  source 1..1944: mol_type = other DNA

SEQ ID NO: 138 - DNA, 1965 bp, synthetic construct
  misc_feature 1..1965: note = Description of sequence: Mutant, Named: NtHAP1b mutant
  source 1..1965: mol_type = other DNA
atggagcaaggctttggttcagactctgttccaccagcagggtccattgacaagtctaaggttttagatgtgaagcctatgagatgtcttatgcctgtttttccatccccaaatggaatgtcgtctgtttcaactcctcaaccctcaccttttgtgtgtgttcctccaagtggtcctttcccaactggggtttctccattttatccatttttggccccgaatgcggccgcaagatcaggtgaaaatcatgaagcttttggttttgggacgcctatatctcctgttcctttaaattcattcagaactccaactgcgaatggagacaccgggccaaggaggcccggcagacctcgcgctacgaatggcttagttgcagaagatgatggtgtcagtgattcacagaatcagagcgaccaattcggcagtggctatagcgtgcacgttaatgatgtagaagacacaagtacagggaaaaaaaggggaagaccgagaaagactaggatgagtcatccagctaattcccatgtcgaagtggatgtcgatccaatactaaatcagctgcttgcatcctttaaacttgtcgagttcgatcaagctaagaaagctgatggcgacaaggagctagttgggcgaatactattggcatttgatgtgtttcgtagaaggttgacccagattgatgagaaaaggggtgagactccaggttctgcaagaaggccggacctaaaggctgctaatttactgatgacaaagggagctcggacaaatcagacaaagagggttggaaatgtacctgggattgaagttggtgacatattcttcttcaggatggaattgtgtctagttggtttgcatgcacctagtatggctgggatagattatatgagtgtcagacttacaggggatgaagagcctattgctgttagcatagtggcctctggaggatatgatgatgaaggggatgatggggatgtgctaatttatactggccagggtggagtccagagaagggatggccaaatgtttgatcagaaacttgagaggggtaatcttgctttggaaaagagtatgcatcgcggcaatgaggtgagagtaattaggggtgttatagatgttacaaatccgagggggaagatttatatgtatgatggcctttacaggatccaggaatcatgggcagagaaaagcaaattgggtgactgcagcattttcaggtacaaattgcttagagtacctgggcagcctgaagcatttacattgtggaaatcaattcaacaatggagggatggaacagcgacacgtgttggagttatcctacctgacctaacatctggcgcagagagtcaacctgtttgtcttgtaaatgatgttgatgatgagaagggacctgcttatttcacatatatccctagtctgaagtactcaaaaccttatatgaagcctaatccgtctatgggttgtcaatgtgttggcggatgccaacctggagggtccgcttgcccttgcattcagaaaaacggaggctttttgccctttagttcacttggagttcttgtgagttacaaaaccttgatacatgagtgtggttctgcctgttcatgccctccgaattgccgaaatcgaatgtctcaaacaggtcctaaagcgcgtgtggaggtcttcaaaacaaaaaatagaggttggggacttaggtcttgggatcccatacgtggaggtggctttatgtgtgaatatgccggagaagtcgttgaagagtctagggtaggtgagcttggcaatgacggtgacgatgattatatatttgatgctacccgcatgtatgagccattggaacctgtgcgtgattataacgacgaatcgaaaaaagtcccgtatccccttgtaatatacgtgaaaataacaatgagacatactaccacattgccttttttgccattaggcatattcctcccatgcaagaattga

SEQ ID NO: 139 - DNA, 1932 bp, synthetic construct
  misc_feature 1..1932: note = Description of sequence: Mutant, Named: NtHAP1b mutant
  source 1..1932: mol_type = other DNA
atggagcaaggctttggttcagactctgttccaccagcagggtccattgacaagtctaaggttttagatgtgaagcctatgagatgtcttatgcctgtttttccatccccaaatggaatgtcgtctgtttcaactcctcaaccctcaccttttgtgtgtgttcctccaagtggtcctttcccaactggggtttctccattttatccatttttggccccgaatgcggccgcaagatcaggtgaaaatcatgaagcttttggttttgggacgcctatatctcctgttcctttaaattcattcagaactccaactgcgaatggagacaccgggccaaggaggcccggcagacctcgcgctacgaatggcttagttgcagaagatgatggtgtcagtgattcacagaatcagagcgaccaattcggcagtggctatagcgtgcacgttaatgatgtagaagacacaagtacagggaaaaaaaggggaagaccgagaaagactaggatgagtcatccagctaattcccatgtcgaagtggatgtcgatccaatactaaatcagctgcttgcatcctttaaacttgtcgagttcgatcaagctaagaaagctgatggcgacaaggagctagttgggcgaatactattggcatttgatgtgtttcgtagaaggttgacccagattgatgagaaaaggggtgagactccaggttctgcaagaaggccggacctaaaggctgctaatttactgatgacaaagggagctcggacaaatcagacaaagagggttggaaatgtacctgggattgaagttggtgacatattcttcttcaggatggaattgtgtctagttggtttgcatgcacctagtatggctgggatagattatatgagtgtcagacttacaggggatgaagagcctattgctgttagcatagtggcctctggaggatatgatgatgaaggggatgatggggatgtgctaatttatactggccagggtggagtccagagaagggatggccaaatgtttgatcagaaacttgagaggggtaatcttgctttggaaaagagtatgcatcgcggcaatgaggtgagagtaattaggggtgttatagatgttacaaatccgagggggaagatttatatgtatgatggcctttacaggatccaggaatcatgggcagagaaaagcaaattgggtgactgcagcattttcaggtacaaattgcttagagtacctgggcagcctgaagcatttacattgtggaaatcaattcaacaatggagggatggaacagcgacacgtgttggagttatcctacctgacctaacatctggcgcagagagtcaacctgtttgtcttgtaaatgatgttgatgatgagaagggacctgcttatttcacatatatccctagtctgaagtactcaaaaccttatatgaagcctaatccgtctatgggttgtcaatgtgttggcggatgccaacctggagggtccgcttgcccttgcattcagaaaaacggaggctttttgccctttagttcacttggagttcttgtgagttacaaaaccttgatacatgagtgtggttctgcctgttcatgccctccgaattgccgaaatcgaatgtctcaaacaggtcctaaagcgcgtgtggaggtcttcaaaacaaaaaatagaggttggggacttaggtcttgggatcccatacgtggaggtggctttatgtgtgaatatgccggagaagtcgttgaagagtctagggtaggtgagcttggcaatgacggtgacgatgattatatatttgatgctacccgcatgtatgagccattggaacctgtgcgtgattataacgacgaatcgaaaaaagtcccgtatccccttgtaataagtgcaaaaaagggtggcaatgttgctcgtttttgttgtacgtga

SEQ ID NO: 140 - DNA, 1944 bp, synthetic construct; identical to SEQ ID NO: 34
  misc_feature 1..1944: note = Description of sequence: Mutant, Named: NtHAP1a mutant
  source 1..1944: mol_type = other DNA

SEQ ID NO: 141 - DNA, 1944 bp, synthetic construct; identical to SEQ ID NO: 35
  misc_feature 1..1944: note = Description of sequence: Mutant, Named: NtHAP1a mutant
  source 1..1944: mol_type = other DNA

SEQ ID NO: 142 - DNA, 1944 bp, synthetic construct; identical to SEQ ID NO: 35
  misc_feature 1..1944: note = Description of sequence: Mutant, Named: NtHAP1a mutant
  source 1..1944: mol_type = other DNA

SEQ ID NO: 143 - DNA, 1944 bp, synthetic construct; identical to SEQ ID NO: 36
  misc_feature 1..1944: note = Description of sequence: Mutant, Named: NtHAP1b mutant
  source 1..1944: mol_type = other DNA

SEQ ID NO: 144 - DNA, 2133 bp, synthetic construct
  misc_feature 1..2133: note = Description of sequence: Mutant, Named: NtHAP1a mutant
  source 1..2133: mol_type = other DNA
atggatcaaggctttggttcagactctgttccaccagcagggtccattgacaagtctaaggttttagatgttaagcctatgagatgtcttatgcctgtttttccatccccaaatggaatgtcatctgtttcaactcctcaaccctcaccttttgtgtgtgttcctccaagtggtcctttcccacctggggtttctccgttttatccatttttggccccaaatggatccggaagatcaggtgaaaatcaggaatcttttggttttgggacgcctatatctccagttcctttaaattcattcagaactccaactgcgaatggagacactgggccaaggaggcccggcagacctcgtgctacgaatgtcttagctgcagaagatgatggtgtctctgattcacagaatcagagcgaccaattcggcagtggctatagcgtgcacgttaatgatgtagaagacacaagtacaggaaaaaaaaggggaagaccgagaaagactaggatgagtcatccagctaactcccatgtcgaagtggatgtcgatccaatactaaatcagctgcttgcgtcctttaaacttgtcgatgtcgatcaggttaagaaagctgatggtgataaggagctagttgggcgaatactattggcatttgatgtgtttcgtagaaggttgacccagattgatgagaaaaggggtgagactccaggttctgcaagaaggccggacctaaaggctgctaatttgctgatgacaaggggagctcggacaaatcagacaaagaggattggaaatgtacctgggattgaagttggtgacatattcttcttcaggatggaattgtgcctagttggtttgcatgcacctagtatggctgggatagattatatgagtgtcagacttacaggggatgaagagcctattgctgttagcatagtggcctctggaggatatgatgatgaaggggatgatggggatgtgctaatttatactggccagggtggagttcagagacgagatggccaaatgtttgatcagaaacttgagaggggtaatcttgctttggaaaagagtatgcatcgcggaaatgaggtgagagtaattaggggtgttatagatgttacaaatccgagggggaagatttatatgtatgatggcctttacaggatccaggaatcatgggcagagaaaagcaaattgggcgactgcagcattttcaggtacaaattgcttagagtacctgggcagcctgaagcatttacattgtggaaatcaattcagcaatggagggatggaacagcgacacgtgttggagttatcctacctgacctaacatctggtgcagagagtcaacctgtttgtcttgtaaatgatgttgatgatgagaagggacctgcttatttcacatatatccctagtctgaagtactcaaaaccttatatgaagcctaatccatccatgggttgtcaatgtgttggcggatgccaacctggagggtccacttgcccttgcattcagaaaaacggaggctttttgccctttagttcacttggagttcttgtgagttacaaaaccttgatacatgactgtggttctgcctgttcatgccctccgaattgccgaaatcgaatgtctcaagcaggtcctaaagcgcgtgtggaggtcttcaaaacaaaaaatagaggttggggacttaggtcttgggatcccatacgtggaggtggctttatttgtgaatatgccggagaagtcgttgaagagtctagggtaggtgagcttggcaatgacggtgacgatgattatatatttgatgctacccgcatgtatgagccattggaacctgtgcgtgattataacgatgtatcgaaaaaggtcccgtatccccttgtaataagtgcaaaaaagggtggcaatgttgctcgttttatgaaccatagttcacctaacgtattctggcagcttgttgtacgtgaaaataacaatgagacatactactacattgccttttttgccattaggcatattcctcccatgcaagaattgacttttgattatggcatggttccaccagacaaagcagatcgtaggaggaagaagtgcttgtgtgggtcattgaactgcagaggttacttttactag

SEQ ID NO: 145 - DNA, 2085 bp, synthetic construct
  misc_feature 1..2085: note = Description of sequence: Mutant, Named: NtHAP1a mutant
  source 1..2085: mol_type = other DNA
atggatcaaggctttggttcagactctgttccaccagcagggtccattgacaagtctaaggttttagatgttaagcctatgagatgtcttatgcctgtttttccatccccaaatggaatgtcatctgtttcaactcctcaaccctcaccttttgtgtgtgttcctccaagtggtcctttcccacctggggtttctccgttttatccatttttggccccaaatggatccggaagatcaggtgaaaatcaggaatcttttggttttgggacgcctatatctccagttcctttaaattcattcagaactccaactgcgaatggagacactgggccaaggaggcccggcagacctcgtgctacgaatgtcttagctgcagaagatgatggtgtctctgattcacagaatcagagcgaccaattcggcagtggctatagcgtgcacgttaatgatgtagaagacacaagtacaggaaaaaaaaggggaagaccgagaaagactaggatgagtcatccagctaactcccatgtcgaagtggatgtcgatccaatactaaatcagctgcttgcgtcctttaaacttgtcgatgtcgatcaggttaagaaagctgatggtgataaggagctagttgggcgaatactattggcatttgatgtgtttcgtagaaggttgacccagattgatgagaaaaggggtgagactccaggttctgcaagaaggccggacctaaaggctgctaatttgctgatgacaaggggagctcggacaaatcagacaaagaggattggaaatgtacctgggattgaagttggtgacatattcttcttcaggatggaattgtgcctagttggtttgcatgcacctagtatggctgggatagattatatgagtgtcagacttacaggggatgaagagcctattgctgttagcatagtggcctctggaggatatgatgatgaaggggatgatggggatgtgctaatttatactggccagggtggagttcagagacgagatggccaaatgtttgatcagaaacttgagaggggtaatcttgctttggaaaagagtatgcatcgcggaaatgaggtgagagtaattaggggtgttatagatgttacaaatccgagggggaagatttatatgtatgatggcctttacaggatccaggaatcatgggcagagaaaagcaaattgggcgactgcagcattttcaggtacaaattgcttagagtacctgggcagcctgaagcatttacattgtggaaatcaattcagcaatggagggatggaacagcgacacgtgttggagttatcctacctgacctaacatctggtgcagagagtcaacctgtttgtcttgtaaatgatgttgatgatgagaagggacctgcttatttcacatatatccctagtctgaagtactcaaaaccttatatgaagcctaatccatccatgggttgtcaatgtgttggcggatgccaacctggagggtccacttgcccttgcattcagaaaaacggaggctttttgccctttagttcacttggagttcttgtgagttacaaaaccttgatacatgactgtggttctgcctgttcatgccctccgaattgccgaaatcgaatgtctcaagcaggtcctaaagcgcgtgtggaggtcttcaaaacaaaaaatagaggttggggacttaggtcttgggatcccatacgtggaggtggctttatttgtgaatatgccggagaagtcgttgaagagtctagggtaggtgagcttggcaatgacggtgacgatgattatatatttgatgctacccgcatgtatgagccattggaacctgtgcgtgattataacgatgtatcgaaaaaggtcccgtatccccttgtaataagtgcaaaaaagggtggcaatgttgctcgttttatgaacaatgagacatactactacattgccttttttgccattaggcatattcctcccatgcaagaattgacttttgattatggcatggttccaccagacaaagcagatcgtaggaggaagaagtgcttgtgtgggtcattgaactgcagaggttacttttactag

SEQ ID NO: 146 - DNA, 2040 bp, synthetic construct; identical to SEQ ID NO: 45
  misc_feature 1..2040: note = Description of sequence: Mutant, Named: NtHAP1b mutant
  source 1..2040: mol_type = other DNA

SEQ ID NO: 147 - DNA, 2130 bp, synthetic construct
  misc_feature 1..2130: note = Description of sequence: Mutant, Named: NtHAP1b mutant
  source 1..2130: mol_type = other DNA
atggagcaaggctttggttcagactctgttccaccagcagggtccattgacaagtctaaggttttagatgtgaagcctatgagatgtcttatgcctgtttttccatccccaaatggaatgtcgtctgtttcaactcctcaaccctcaccttttgtgtgtgttcctccaagtggtcctttcccaactggggtttctccattttatccatttttggccccgaatgcggccgcaagatcaggtgaaaatcatgaagcttttggttttgggacgcctatatctcctgttcctttaaattcattcagaactccaactgcgaatggagacaccgggccaaggaggcccggcagacctcgcgctacgaatggcttagttgcagaagatgatggtgtcagtgattcacagaatcagagcgaccaattcggcagtggctatagcgtgcacgttaatgatgtagaagacacaagtacagggaaaaaaaggggaagaccgagaaagactaggatgagtcatccagctaattcccatgtcgaagtggatgtcgatccaatactaaatcagctgcttgcatcctttaaacttgtcgagttcgatcaagctaagaaagctgatggcgacaaggagctagttgggcgaatactattggcatttgatgtgtttcgtagaaggttgacccagattgatgagaaaaggggtgagactccaggttctgcaagaaggccggacctaaaggctgctaatttactgatgacaaagggagctcggacaaatcagacaaagagggttggaaatgtacctgggattgaagttggtgacatattcttcttcaggatggaattgtgtctagttggtttgcatgcacctagtatggctgggatagattatatgagtgtcagacttacaggggatgaagagcctattgctgttagcatagtggcctctggaggatatgatgatgaaggggatgatggggatgtgctaatttatactggccagggtggagtccagagaagggatggccaaatgtttgatcagaaacttgagaggggtaatcttgctttggaaaagagtatgcatcgcggcaatgaggtgagagtaattaggggtgttatagatgttacaaatccgagggggaagatttatatgtatgatggcctttacaggatccaggaatcatgggcagagaaaagcaaattgggtgactgcagcattttcaggtacaaattgcttagagtacctgggcagcctgaagcatttacattgtggaaatcaattcaacaatggagggatggaacagcgacacgtgttggagttatcctacctgacctaacatctggcgcagagagtcaacctgtttgtcttgtaaatgatgttgatgatgagaagggacctgcttatttcacatatatccctagtctgaagtactcaaaaccttatatgaagcctaatccgtctatgggttgtcaatgtgttggcggatgccaacctggagggtccgcttgcccttgcattcagaaaaacggaggctttttgccctttagttcacttggagttcttgtgagttacaaaaccttgatacatgagtgtggttctgcctgttcatgccctccgaattgccgaaatcgaatgtctcaaacaggtcctaaagcgcgtgtggaggtcttcaaaacaaaaaatagaggttggggacttaggtcttgggatcccatacgtggaggtggctttatgtgtgaatatgccggagaagtcgttgaagagtctagggtaggtgagcttggcaatgacggtgacgatgattatatatttgatgctacccgcatgtatgagccattggaacctgtgcgtgattataacgacgaatcgaaaaaagtcccgtatccccttgtaataagtgcaaaaaagggtggcaatgttgctcgttttatgaaccatagacctaacgtattctggcagcttgttgtacgtgaaaataacaatgagacatactaccacattgccttttttgccattaggcatattcctcccatgcaagaattgacttttgattatggcatggttccgccagacaaagcagactgtaggaggaagaagtgcttgtgtgggtcattgaactgcagaggttacttttactag

SEQ ID NO: 148 - DNA, 1944 bp, synthetic construct; identical to SEQ ID NO: 34
  misc_feature 1..1944: note = Description of sequence: Mutant, Named: NtHAP1a mutant
  source 1..1944: mol_type = other DNA

SEQ ID NO: 149 - DNA, 2040 bp, synthetic construct; identical to SEQ ID NO: 37
  misc_feature 1..2040: note = Description of sequence: Mutant, Named: NtHAP1a mutant
  source 1..2040: mol_type = other DNA

SEQ ID NO: 150 - DNA, 2058 bp, synthetic construct
  misc_feature 1..2058: note = Description of sequence: Mutant, Named: NtHAP1b mutant
  source 1..2058: mol_type = other DNA
atggagcaaggctttggttcagactctgttccaccagcagggtccattgacaagtctaaggttttagatgtgaagcctatgagatgtcttatgcctgtttttccatccccaaatggaatgtcgtctgtttcaactcctcaaccctcaccttttgtgtgtgttcctccaagtggtcctttcccaactggggtttctccattttatccatttttggccccgaatgcggccgcaagatcaggtgaaaatcatgaagcttttggttttgggacgcctatatctcctgttcctttaaattcattcagaactccaactgcgaatggagacaccgggccaaggaggcccggcagacctcgcgctacgaatggcttagttgcagaagatgatggtgtcagtgattcacagaatcagagcgaccaattcggcagtggctatagcgtgcacgttaatgatgtagaagacacaagtacagggaaaaaaaggggaagaccgagaaagactaggatgagtcatccagctaattcccatgtcgaagtggatgtcgatccaatactaaatcagctgcttgcatcctttaaacttgtcgagttcgatcaagctaagaaagctgatggcgacaaggagctagttgggcgaatactattggcatttgatgtgtttcgtagaaggttgacccagattgatgagaaaaggggtgagactccaggttctgcaagaaggccggacctaaaggctgctaatttactgatgacaaagggagctcggacaaatcagacaaagagggttggaaatgtacctgggattgaagttggtgacatattcttcttcaggatggaattgtgtctagttggtttgcatgcacctagtatggctgggatagattatatgagtgtcagacttacaggggatgaagagcctattgctgttagcatagtggcctctggaggatatgatgatgaaggggatgatggggatgtgctaatttatactggccagggtggagtccagagaagggatggccaaatgtttgatcagaaacttgagaggggtaatcttgctttggaaaagagtatgcatcgcggcaatgaggtgagagtaattaggggtgttatagatgttacaaatccgagggggaagatttatatgtatgatggcctttacaggatccaggaatcatgggcagagaaaagcaaattgggtgactgcagcattttcaggtacaaattgcttagagtacctgggcagcctgaagcatttacattgtggaaatcaattcaacaatggagggatggaacagcgacacgtgttggagttatcctacctgacctaacatctggcgcagagagtcaacctgtttgtcttgtaaatgatgttgatgatgagaagggacctgcttatttcacatatatccctagtctgaagtactcaaaaccttatatgaagcctaatccgtctatgggttgtcaatgtgttggcggatgccaacctggagggtccgcttgcccttgcattcagaaaaacggaggctttttgccctttagttcacttggagttcttgtgagttacaaaaccttgatacatgagtgtggttctgcctgttcatgccctccgaattgccgaaatcgaatgtctcaaacaggtcctaaagcgcgtgtggaggtcttcaaaacaaaaaatagaggttggggacttaggtcttgggatcccatacgtggaggtggctttatgtgtgaatatgccggagaagtcgttgaagagtctagggtaggtgagcttggcaatgacggtgacgatgattatatatttgatgctacccgcatgtatgagccattggaacctgtgcgtgattataacgacgaatcgaaaaaagtcccgtatccccttgttgtacgtgaaaataacaatgagacatactaccacattgccttttttgccattaggcatattcctcccatgcaagaattgacttttgattatggcatggttccgccagacaaagcagactgtaggaggaagaagtgcttgtgtgggtcattgaactgcagaggttacttttactag

SEQ ID NO: 151 - DNA, 2034 bp, synthetic construct
  misc_feature 1..2034: note = Description of sequence: Mutant, Named: NtHAP1b mutant
  source 1..2034: mol_type = other DNA
atggagcaaggctttggttcagactctgttccaccagcagggtccattgacaagtctaaggttttagatgtgaagcctatgagatgtcttatgcctgtttttccatccccaaatggaatgtcgtctgtttcaactcctcaaccctcaccttttgtgtgtgttcctccaagtggtcctttcccaactggggtttctccattttatccatttttggccccgaatgcggccgcaagatcaggtgaaaatcatgaagcttttggttttgggacgcctatatctcctgttcctttaaattcattcagaactccaactgcgaatggagacaccgggccaaggaggcccggcagacctcgcgctacgaatggcttagttgcagaagatgatggtgtcagtgattcacagaatcagagcgaccaattcggcagtggctatagcgtgcacgttaatgatgtagaagacacaagtacagggaaaaaaaggggaagaccgagaaagactaggatgagtcatccagctaattcccatgtcgaagtggatgtcgatccaatactaaatcagctgcttgcatcctttaaacttgtcgagttcgatcaagctaagaaagctgatggcgacaaggagctagttgggcgaatactattggcatttgatgtgtttcgtagaaggttgacccagattgatgagaaaaggggtgagactccaggttctgcaagaaggccggacctaaaggctgctaatttactgatgacaaagggagctcggacaaatcagacaaagagggttggaaatgtacctgggattgaagttggtgacatattcttcttcaggatggaattgtgtctagttggtttgcatgcacctagtatggctgggatagattatatgagtgtcagacttacaggggatgaagagcctattgctgttagcatagtggcctctggaggatatgatgatgaaggggatgatggggatgtgctaatttatactggccagggtggagtccagagaagggatggccaaatgtttgatcagaaacttgagaggggtaatcttgctttggaaaagagtatgcatcgcggcaatgaggtgagagtaattaggggtgttatagatgttacaaatccgagggggaagatttatatgtatgatggcctttacaggatccaggaatcatgggcagagaaaagcaaattgggtgactgcagcattttcaggtacaaattgcttagagtacctgggcagcctgaagcatttacattgtggaaatcaattcaacaatggagggatggaacagcgacacgtgttggagttatcctacctgacctaacatctggcgcagagagtcaacctgtttgtcttgtaaatgatgttgatgatgagaagggacctgcttatttcacatatatccctagtctgaagtactcaaaaccttatatgaagcctaatccgtctatgggttgtcaatgtgttggcggatgccaacctggagggtccgcttgcccttgcattcagaaaaacggaggctttttgccctttagttcacttggagttcttgtgagttacaaaaccttgatacatgagtgtggttctgcctgttcatgccctccgaattgccgaaatcgaatgtctcaaacaggtcctaaagcgcgtgtggaggtcttcaaaacaaaaaatagaggttggggacttaggtcttgggatcccatacgtggaggtggctttatgtgtgaatatgccggagaagtcgttgaagagtctagggtaggtgagcttggcaatgacggtgacgatgattatatatttgatgctacccgcatgtatgagccattggaacctgtgcgtgattataacgacgaatcgaaaaaagtcccgtatccccttgtaataagtgcaaaaaagggtggcaatgttgctcgttttatgaaccatagtttgttcacctaacgtattctggcagcttgttgtacgtgaaaataacaatgagacatactaccacattgccttttttgccattaggcatattcctcccatgca

SEQ ID NO: 152 - DNA, 2037 bp, synthetic construct
  misc_feature 1..2037: note = Description of sequence: Mutant, Named: NtHAP1a mutant
  source 1..2037: mol_type = other DNA
atggatcaaggctttggttcagactctgttccaccagcagggtccattgacaagtctaaggttttagatgttaagcctatgagatgtcttatgcctgtttttccatccccaaatggaatgtcatctgtttcaactcctcaaccctcaccttttgtgtgtgttcctccaagtggtcctttcccacctggggtttctccgttttatccatttttggccccaaatggatccggaagatcaggtgaaaatcaggaatcttttggttttgggacgcctatatctccagttcctttaaattcattcagaactccaactgcgaatggagacactgggccaaggaggcccggcagacctcgtgctacgaatgtcttagctgcagaagatgatggtgtctctgattcacagaatcagagcgaccaattcggcagtggctatagcgtgcacgttaatgatgtagaagacacaagtacaggaaaaaaaaggggaagaccgagaaagactaggatgagtcatccagctaactcccatgtcgaagtggatgtcgatccaatactaaatcagctgcttgcgtcctttaaacttgtcgatgtcgatcaggttaagaaagctgatggtgataaggagctagttgggcgaatactattggcatttgatgtgtttcgtagaaggttgacccagattgatgagaaaaggggtgagactccaggttctgcaagaaggccggacctaaaggctgctaatttgctgatgacaaggggagctcggacaaatcagacaaagaggattggaaatgtacctgggattgaagttggtgacatattcttcttcaggatggaattgtgcctagttggtttgcatgcacctagtatggctgggatagattatatgagtgtcagacttacaggggatgaagagcctattgctgttagcatagtggcctctggaggatatgatgatgaaggggatgatggggatgtgctaatttatactggccagggtggagttcagagacgagatggccaaatgtttgatcagaaacttgagaggggtaatcttgctttggaaaagagtatgcatcgcggaaatgaggtgagagtaattaggggtgttatagatgttacaaatccgagggggaagatttatatgtatgatggcctttacaggatccaggaatcatgggcagagaaaagcaaattgggcgactgcagcattttcaggtacaaattgcttagagtacctgggcagcctgaagcatttacattgtggaaatcaattcagcaatggagggatggaacagcgacacgtgttggagttatcctacctgacctaacatctggtgcagagagtcaacctgtttgtcttgtaaatgatgttgatgatgagaagggacctgcttatttcacatatatccctagtctgaagtactcaaaaccttatatgaagcctaatccatccatgggttgtcaatgtgttggcggatgccaacctggagggtccacttgcccttgcattcagaaaaacggaggctttttgccctttagttcacttggagttcttgtgagttacaaaaccttgatacatgactgtggttctgcctgttcatgccctccgaattgccgaaatcgaatgtctcaagcaggtcctaaagcgcgtgtggaggtcttcaaaacaaaaaatagaggttggggacttaggtcttgggatcccatacgtggaggtggctttatttgtgaatatgccggagaagtcgttgaagagtctagggtaggtgagcttggcaatgacggtgacgatgattatatatttgatgctacccgcatgtatgagccattggaacctgtgcgtgattataacgatgtatcgaaaaaggtcccgtatccccttgtaataagtgcaaaaaagggtggcaatgttgctcgttttatgaaccatattcacctaacgtattctggcagcttgttgtacgtgaaaataacaatgagacatactactacattgccttttttgccattaggcatattcctcccatgcaagaattga

SEQ ID NO: 153 - DNA, 1944 bp, synthetic construct; identical to SEQ ID NO: 34
  misc_feature 1..1944: note = Description of sequence: Mutant, Named: NtHAP1a mutant
  source 1..1944: mol_type = other DNA

SEQ ID NO: 154 - DNA, 1944 bp, synthetic construct; identical to SEQ ID NO: 36
  misc_feature 1..1944: note = Description of sequence: Mutant, Named: NtHAP1b mutant
  source 1..1944: mol_type = other DNA

SEQ ID NO: 155 - DNA, 2130 bp, synthetic construct; identical to SEQ ID NO: 147
  misc_feature 1..2130: note = Description of sequence: Mutant, Named: NtHAP1b mutant
  source 1..2130: mol_type = other DNA

SEQ ID NO: 156 - DNA, 2037 bp, synthetic construct; identical to SEQ ID NO: 152
  misc_feature 1..2037: note = Description of sequence: Mutant, Named: NtHAP1a mutant
  source 1..2037: mol_type = other DNA

SEQ ID NO: 157 - DNA, 1944 bp, synthetic construct; identical to SEQ ID NO: 34
  misc_feature 1..1944: note = Description of sequence: Mutant, Named: NtHAP1a mutant
  source 1..1944: mol_type = other DNA

SEQ ID NO: 158 - DNA, 1944 bp, synthetic construct; identical to SEQ ID NO: 36
  misc_feature 1..1944: note = Description of sequence: Mutant, Named: NtHAP1b mutant
  source 1..1944: mol_type = other DNA

SEQ ID NO: 159 - DNA, 2130 bp, synthetic construct; identical to SEQ ID NO: 147
  misc_feature 1..2130: note = Description of sequence: Mutant, Named: NtHAP1b mutant
  source 1..2130: mol_type = other DNA

SEQ ID NO: 160 - DNA, 2037 bp, synthetic construct; identical to SEQ ID NO: 152
  misc_feature 1..2037: note = Description of sequence: Mutant, Named: NtHAP1a mutant
  source 1..2037: mol_type = other DNA

SEQ ID NO: 161 - DNA, 1944 bp, synthetic construct; identical to SEQ ID NO: 34
  misc_feature 1..1944: note = Description of sequence: Mutant, Named: NtHAP1a mutant
  source 1..1944: mol_type = other DNA

SEQ ID NO: 162 - DNA, 1944 bp, synthetic construct; identical to SEQ ID NO: 36
  misc_feature 1..1944: note = Description of sequence: Mutant, Named: NtHAP1b mutant
  source 1..1944: mol_type = other DNA

SEQ ID NO: 163 - DNA, 2130 bp, synthetic construct; identical to SEQ ID NO: 147
  misc_feature 1..2130: note = Description of sequence: Mutant, Named: NtHAP1b mutant
  source 1..2130: mol_type = other DNA

SEQ ID NO: 164 - DNA, 1944 bp, synthetic construct; identical to SEQ ID NO: 34
  misc_feature 1..1944: note = Description of sequence: Mutant, Named: NtHAP1a mutant
  source 1..1944: mol_type = other DNA

SEQ ID NO: 165 - DNA, 1944 bp, synthetic construct; identical to SEQ ID NO: 36
  misc_feature 1..1944: note = Description of sequence: Mutant, Named: NtHAP1b mutant
  source 1..1944: mol_type = other DNA

SEQ ID NO: 166 - DNA, 1944 bp, synthetic construct; identical to SEQ ID NO: 34
  misc_feature 1..1944: note = Description of sequence: Mutant, Named: NtHAP1a mutant
  source 1..1944: mol_type = other DNA

SEQ ID NO: 167 - DNA, 1944 bp, synthetic construct; identical to SEQ ID NO: 35
  misc_feature 1..1944: note = Description of sequence: Mutant, Named: NtHAP1a mutant
  source 1..1944: mol_type = other DNA

SEQ ID NO: 168 - DNA, 1944 bp, synthetic construct; identical to SEQ ID NO: 54
  misc_feature 1..1944: note = Description of sequence: Mutant, Named: NtHAP1b mutant
  source 1..1944: mol_type = other DNA

SEQ ID NO: 169 - DNA, 2037 bp, synthetic construct; identical to SEQ ID NO: 152
  misc_feature 1..2037: note = Description of sequence: Mutant, Named: NtHAP1a mutant
  source 1..2037: mol_type = other DNA

SEQ ID NO: 170 - DNA, 1944 bp, synthetic construct; identical to SEQ ID NO: 34
  misc_feature 1..1944: note = Description of sequence: Mutant, Named: NtHAP1a mutant
  source 1..1944: mol_type = other DNA

SEQ ID NO: 171 - DNA, 1944 bp, synthetic construct; identical to SEQ ID NO: 36
  misc_feature 1..1944: note = Description of sequence: Mutant, Named: NtHAP1b mutant
  source 1..1944: mol_type = other DNA

SEQ ID NO: 172 - DNA, 2130 bp, synthetic construct; identical to SEQ ID NO: 147
  misc_feature 1..2130: note = Description of sequence: Mutant, Named: NtHAP1b mutant
  source 1..2130: mol_type = other DNA

SEQ ID NO: 173 - DNA, 2037 bp, synthetic construct; identical to SEQ ID NO: 152
  misc_feature 1..2037: note = Description of sequence: Mutant, Named: NtHAP1a mutant
  source 1..2037: mol_type = other DNA

SEQ ID NO: 174 - DNA, 1944 bp, synthetic construct; identical to SEQ ID NO: 34
  misc_feature 1..1944: note = Description of sequence: Mutant, Named: NtHAP1a mutant
  source 1..1944: mol_type = other DNA

SEQ ID NO: 175 - DNA, 1944 bp, synthetic construct; identical to SEQ ID NO: 36
  misc_feature 1..1944: note = Description of sequence: Mutant, Named: NtHAP1b mutant
  source 1..1944: mol_type = other DNA

SEQ ID NO: 176 - DNA, 2130 bp, synthetic construct; identical to SEQ ID NO: 147
  misc_feature 1..2130: note = Description of sequence: Mutant, Named: NtHAP1b mutant
  source 1..2130: mol_type = other DNA

SEQ ID NO: 177 - DNA, 2040 bp, synthetic construct; identical to SEQ ID NO: 37
  misc_feature 1..2040: note = Description of sequence: Mutant, Named: NtHAP1a mutant
  source 1..2040: mol_type = other DNA

SEQ ID NO: 178 - DNA, 2037 bp, synthetic construct
  misc_feature 1..2037: note = Description of sequence: Mutant, Named: NtHAP1a mutant
  source 1..2037: mol_type = other DNA
atggatcaaggctttggttcagactctgttccaccagcagggtccattgacaagtctaaggttttagatgttaagcctatgagatgtcttatgcctgtttttccatccccaaatggaatgtcatctgtttcaactcctcaaccctcaccttttgtgtgtgttcctccaagtggtcctttcccacctggggtttctccgttttatccatttttggccccaaatggatccggaagatcaggtgaaaatcaggaatcttttggttttgggacgcctatatctccagttcctttaaattcattcagaactccaactgcgaatggagacactgggccaaggaggcccggcagacctcgtgctacgaatgtcttagctgcagaagatgatggtgtctctgattcacagaatcagagcgaccaattcggcagtggctatagcgtgcacgttaatgatgtagaagacacaagtacaggaaaaaaaaggggaagaccgagaaagactaggatgagtcatccagctaactcccatgtcgaagtggatgtcgatccaatactaaatcagctgcttgcgtcctttaaacttgtcgatgtcgatcaggttaagaaagctgatggtgataaggagctagttgggcgaatactattggcatttgatgtgtttcgtagaaggttgacccagattgatgagaaaaggggtgagactccaggttctgcaagaaggccggacctaaaggctgctaatttgctgatgacaaggggagctcggacaaatcagacaaagaggattggaaatgtacctgggattgaagttggtgacatattcttcttcaggatggaattgtgcctagttggtttgcatgcacctagtatggctgggatagattatatgagtgtcagacttacaggggatgaagagcctattgctgttagcatagtggcctctggaggatatgatgatgaaggggatgatggggatgtgctaatttatactggccagggtggagttcagagacgagatggccaaatgtttgatcagaaacttgagaggggtaatcttgctttggaaaagagtatgcatcgcggaaatgaggtgagagtaattaggggtgttatagatgttacaaatccgagggggaagatttatatgtatgatggcctttacaggatccaggaatcatgggcagagaaaagcaaattgggcgactgcagcattttcaggtacaaattgcttagagtacctgggcagcctgaagcatttacattgtggaaatcaattcagcaatggagggatggaacagcgacacgtgttggagttatcctacctgacctaacatctggtgcagagagtcaacctgtttgtcttgtaaatgatgttgatgatgagaagggacctgcttatttcacatatatccctagtctgaagtactcaaaaccttatatgaagcctaatccatccatgggttgtcaatgtgttggcggatgccaacctggagggtccacttgcccttgcattcagaaaaacggaggctttttgccctttagttcacttggagttcttgtgagttacaaaaccttgatacatgactgtggttctgcctgttcatgccctccgaattgccgaaatcgaatgtctcaagcaggtcctaaagcgcgtgtggaggtcttcaaaacaaaaaatagaggttggggacttaggtcttgggatcccatacgtggaggtggctttatttgtgaatatgccggagaagtcgttgaagagtctagggtaggtgagcttggcaatgacggtgacgatgattatatatttgatgctacccgcatgtatgagccattggaacctgtgcgtgattataacgatgtatcgaaaaaggtcccgtatccccttgtaataagtgcaaaaaagggtggcaatgttgctcgttttatgaaccatagtcacctaacgtattctggcagcttgttgtacgtgaaaataacaatgagacatactactacattgccttttttgccattaggcatattcctcccatgcaagaattga

SEQ ID NO: 179 - DNA, 2112 bp, synthetic construct
  misc_feature 1..2112: note = Description of sequence: Mutant, Named: NtHAP1b mutant
  source 1..2112: mol_type = other DNA
atggagcaaggctttggttcagactctgttccaccagcagggtccattgacaagtctaaggttttagatgtgaagcctatgagatgtcttatgcctgtttttccatccccaaatggaatgtcgtctgtttcaactcctcaaccctcaccttttgtgtgtgttcctccaagtggtcctttcccaactggggtttctccattttatccatttttggccccgaatgcggccgcaagatcaggtgaaaatcatgaagcttttggttttgggacgcctatatctcctgttcctttaaattcattcagaactccaactgcgaatggagacaccgggccaaggaggcccggcagacctcgcgctacgaatggcttagttgcagaagatgatggtgtcagtgattcacagaatcagagcgaccaattcggcagtggctatagcgtgcacgttaatgatgtagaagacacaagtacagggaaaaaaaggggaagaccgagaaagactaggatgagtcatccagctaattcccatgtcgaagtggatgtcgatccaatactaaatcagctgcttgcatcctttaaacttgtcgagttcgatcaagctaagaaagctgatggcgacaaggagctagttgggcgaatactattggcatttgatgtgtttcgtagaaggttgacccagattgatgagaaaaggggtgagactccaggttctgcaagaaggccggacctaaaggctgctaatttactgatgacaaagggagctcggacaaatcagacaaagagggttggaaatgtacctgggattgaagttggtgacatattcttcttcaggatggaattgtgtctagttggtttgcatgcacctagtatggctgggatagattatatgagtgtcagacttacaggggatgaagagcctattgctgttagcatagtggcctctggaggatatgatgatgaaggggatgatggggatgtgctaatttatactggccagggtggagtccagagaagggatggccaaatgtttgatcagaaacttgagaggggtaatcttgctttggaaaagagtatgcatcgcggcaatgaggtgagagtaattaggggtgttatagatgttacaaatccgagggggaagatttatatgtatgatggcctttacaggatccaggaatcatgggcagagaaaagcaaattgggtgactgcagcattttcaggtacaaattgcttagagtacctgggcagcctgaagcatttacattgtggaaatcaattcaacaatggagggatggaacagcgacacgtgttggagttatcctacctgacctaacatctggcgcagagagtcaacctgtttgtcttgtaaatgatgttgatgatgagaagggacctgcttatttcacatatatccctagtctgaagtactcaaaaccttatatgaagcctaatccgtctatgggttgtcaatgtgttggcggatgccaacctggagggtccgcttgcccttgcattcagaaaaacggaggctttttgccctttagttcacttggagttcttgtgagttacaaaaccttgatacatgagtgtggttctgcctgttcatgccctccgaattgccgaaatcgaatgtctcaaacaggtcctaaagcgcgtgtggaggtcttcaaaacaaaaaatagaggttggggacttaggtcttgggatcccatacgtggaggtggctttatgtgtgaatatgccggagaagtcgttgaagagtctagggtaggtgagcttggcaatgacggtgacgatgattatatatttgatgctacccgcatgtatgagccattggaacctgtgcgtgattataacgacgaatcgaaaaaagtcccgtatccccttgtaataagtgcaaaaaagggtggcatttgttcacctaacgtattctggcagcttgttgtacgtgaaaataacaatgagacatactaccacattgccttttttgccattaggcatattcctcccatgcaagaattgacttttgattatggcatggttccgccagacaaagcagactgtaggaggaagaagtgcttgtgtgggtcattgaactgcagaggttacttttactag

SEQ ID NO: 180 - DNA, 2112 bp, synthetic construct; identical to SEQ ID NO: 179
  misc_feature 1..2112: note = Description of sequence: Mutant, Named: NtHAP1b mutant
  source 1..2112: mol_type = other DNA

SEQ ID NO: 181 - DNA, 1944 bp, synthetic construct; identical to SEQ ID NO: 36
  misc_feature 1..1944: note = Description of sequence: Mutant, Named: NtHAP1b mutant
  source 1..1944: mol_type = other DNA

SEQ ID NO: 182 - DNA, 24 bp, synthetic construct
  misc_feature 1..24: note = Description of sequence: Mutant, Named: NtHAP2 mutant
  source 1..24: mol_type = other DNA
atggaacaaggtttgcgttcatga

SEQ ID NO: 183 - DNA, 27 bp, synthetic construct
  misc_feature 1..27: note = Description of sequence: Mutant, Named: NtHAP2 mutant
  source 1..27: mol_type = other DNA
atggaacaaggtttgcgttcagggtaa

SEQ ID NO: 184 - DNA, 1944 bp, synthetic construct; identical to SEQ ID NO: 35
  misc_feature 1..1944: note = Description of sequence: Mutant, Named: NtHAP1a mutant
  source 1..1944: mol_type = other DNA

SEQ ID NO: 185 - DNA, 1944 bp, synthetic construct; identical to SEQ ID NO: 36
  misc_feature 1..1944: note = Description of sequence: Mutant, Named: NtHAP1b mutant
  source 1..1944: mol_type = other DNA

SEQ ID NO: 186 - DNA, 2132 bp, synthetic construct
  misc_feature 1..2132: note = Description of sequence: Mutant, Named: NtHAP1b mutant
  source 1..2132: mol_type = other DNA
atggagcaaggctttggttcagactctgttccaccagcagggtccattgacaagtctaaggttttagatgtgaagcctatgagatgtcttatgcctgtttttccatccccaaatggaatgtcgtctgtttcaactcctcaaccctcaccttttgtgtgtgttcctccaagtggtcctttcccaactggggtttctccattttatccatttttggccccgaatgcggccgcaagatcaggtgaaaatcatgaagcttttggttttgggacgcctatatctcctgttcctttaaattcattcagaactccaactgcgaatggagacaccgggccaaggaggcccggcagacctcgcgctacgaatggcttagttgcagaagatgatggtgtcagtgattcacagaatcagagcgaccaattcggcagtggctatagcgtgcacgttaatgatgtagaagacacaagtacagggaaaaaaaggggaagaccgagaaagactaggatgagtcatccagctaattcccatgtcgaagtggatgtcgatccaatactaaatcagctgcttgcatcctttaaacttgtcgagttcgatcaagctaagaaagctgatggcgacaaggagctagttgggcgaatactattggcatttgatgtgtttcgtagaaggttgacccagattgatgagaaaaggggtgagactccaggttctgcaagaaggccggacctaaaggctgctaatttactgatgacaaagggagctcggacaaatcagacaaagagggttggaaatgtacctgggattgaagttggtgacatattcttcttcaggatggaattgtgtctagttggtttgcatgcacctagtatggctgggatagattatatgagtgtcagacttacaggggatgaagagcctattgctgttagcatagtggcctctggaggatatgatgatgaaggggatgatggggatgtgctaatttatactggccagggtggagtccagagaagggatggccaaatgtttgatcagaaacttgagaggggtaatcttgctttggaaaagagtatgcatcgcggcaatgaggtgagagtaattaggggtgttatagatgttacaaatccgagggggaagatttatatgtatgatggcctttacaggatccaggaatcatgggcagagaaaagcaaattgggtgactgcagcattttcaggtacaaattgcttagagtacctgggcagcctgaagcatttacattgtggaaatcaattcaacaatggagggatggaacagcgacacgtgttggagttatcctacctgacctaacatctggcgcagagagtcaacctgtttgtcttgtaaatgatgttgatgatgagaagggacctgcttatttcacatatatccctagtctgaagtactcaaaaccttatatgaagcctaatccgtctatgggttgtcaatgtgttggcggatgccaacctggagggtccgcttgcccttgcattcagaaaaacggaggctttttgccctttagttcacttggagttcttgtgagttacaaaaccttgatacatgagtgtggttctgcctgttcatgccctccgaattgccgaaatcgaatgtctcaaacaggtcctaaagcgcgtgtggaggtcttcaaaacaaaaaatagaggttggggacttaggtcttgggatcccatacgtggaggtggctttatgtgtgaatatgccggagaagtcgttgaagagtctagggtaggtgagcttggcaatgacggtgacgatgattatatatttgatgctacccgcatgtatgagccattggaacctgtgcgtgattataacgacgaatcgaaaaaagtcccgtatccccttgtaataagtgcaaaaaagggtggcaatgttgctcgttttatgaaccatagtcacctaacgtattctggcagcttgttgtacgtgaaaataacaatgagacatactaccacattgccttttttgccattaggcatattcctcccatgcaagaattgacttttgattatggcatggttccgccagacaaagcagactgtaggaggaagaagtgcttgtgtgggtcattgaactgcagaggttacttttactag

SEQ ID NO: 187 - DNA, 1920 bp, synthetic construct
  misc_feature 1..1920: note = Description of sequence: Mutant, Named: NtHAP2 mutant
  source 1..1920: mol_type = other DNA
atggaacaaggtttgcgttctgagggtaataatcctccgagcatcgataagactagggttttggatgtgaagcctttgagatgtcttgcacctgtttttccatccccaaatggaatgtcttctgtttcaactccacagccatcaccttttgtctgtgttcctcccactggtccgttcccccctggggttgctccattttacccctttgtggctccaaatgagtcgggaaggccaggtgaaagtagtcaacaaactccaagtggggtgccgaatcagggcggcccttttggttttgcgcagcctatatctcccgttcctttaaactcattcagaactccaacaactgcgaatggaaatagtgggaggtccaggagggctgtagacgatgatgattacagtaattcacaggatcagaatgaccaatttgccagtggatttagtgtgcacgtgaataatgttgaagattccggtactggaaaaaaaaggggaagaccgaaaaagcctcggagagctcagcaggctgaggggtcaacccctttggaagtggatgttgaacctttgttgactcagttgctcacgtcttttaaacttgttgacttcgatcaggtcaagaaagctgatggtgacaaggagctagtggggagggtactgttggtttttgacttgttcagaagaaggatgacccaaattgacgaatcgagggatgggtcaggttctggtagaagaccagacctaaaagcttctaatatgctgatgacaaagggagttcggacaaaccaaacaaagaggattggaaatgcacccgggattgaagttggtgacatcttcttcttcaggatggaattgtgcctagtgggattgcatgcgccaactatggctgggatagattatatgagtgtcaaactaacaatggacgaagaacctcttgcggtcagcatagtgtcctctggaggatatgatgatgatggaggtgatggcgatgtattaatttacactggccagggtggagtccagaggaaagacgggcaagtgtttgatcagaaacttgagaggggaaaccttgctctggaaaagagtgtgcatcgagccaatgaagtaagagtaattaggggtgttaaggatgtcgcatatccaaccgggaagatttatatttacgacggactttataagattcaggaatcatgggcagagaaaaacaaggtgggctgcaatgtattcaagtacaaacttctgagagtccctgggcagcccgaagcatttaaagtatggaagtcaattcagcaatggaaagatggcgtggcatcacgtgttggagtcatcctaccggacctgacgtctggtgcagaaagtcaaccagtttgtcttgttaatgatgtagatgacgagaaaggacctgcctatttcacatatattcctagtttgaagtactcaaaaccttttgtaatgcctagaccctctccgagttgtcactgcgttggcgggtgccaacctggtgactccaattgcgcttgtattcagagtaatggtggctttttgccttatagttcacttggagttcttttgagttacaaagccttgatacatgagtgtggttcggcctgttcatgccctcctaattgccgaaatcgaatgtctcaaggaggtcctaaagctcgtttggaggtcttcaagacaaaaaatagaggttggggactcagatcttgggatcctatacgtggaggtggtttcatttgtgaatatgctggagaagtcatagacgctggtaattacagtgacgacaattacatttttgatgcaacccgtatatatgcgccattggaagccgagcgtgattataatgacgagtctcggaaagtcccttttcccctggtacataagtgccaagaatggtggaaatatttctcgctttatgaaccatag

SEQ ID NO: 188 - DNA, 1875 bp, synthetic construct
  misc_feature 1..1875: note = Description of sequence: Mutant, Named: NtHAP2 mutant
  source 1..1875: mol_type = other DNA
atggaacaaggtttgcgttctgagggtaataatcctccgagcatcgataagactagggttttggatgtgaagcctttgagatgtcttgcacctgtttttccatccccaaatggaatgtcttctgtttcaactccacagccatcaccttttgtctgtgttcctcccactggtccgttcccccctggggttgctccattttacccctttgtggctccaaatgagtcgggaaggccaggtgaaagtagtcaacaaactccaagtggggtgccgaatcagggcggcccttttggttttgcgcagcctatatctcccgttcctttaaactcattcagaactccaacaactgcgaatggaaatagtgggaggtccaggagggctgtagacgatgatgattacagtaattcacaggatcagaatgaccaatttgccagtggatttagtgtgcacgtgaataatgttgaagattccggtactggaaaaaaaaggggaagaccgaaaaagcctcggagagctcagcaggctgaggggtcaacccctttggaagtggatgttgaacctttgttgactcagttgctcacgtcttttaaacttgttgacttcgatcaggtcaagaaagctgatggtgacaaggagctagtggggagggtactgttggtttttgacttgttcagaagaaggatgacccaaattgacgaatcgagggatgggtcaggttctggtagaagaccagacctaaaagcttctaatatgctgatgacaaagggagttcggacaaaccaaacaaagaggattggaaatgcacccgggattgaagttggtgacatcttcttcttcaggatggaattgtgcctagtgggattgcatgcgccaactatggctgggatagattatatgagtgtcaaactaacaatggacgaagaacctcttgcggtcagcatagtgtcctctggaggatatgatgatgatggaggtgatggcgatgtattaatttacactggccagggtggagtccagaggaaagacgggcaagtgtttgatcagaaacttgagaggggaaaccttgctctggaaaagagtgtgcatcgagccaatgaagtaagagtaattaggggtgttaaggatgtcgcatatccaaccgggaagatttatatttacgacggactttataagattcaggaatcatgggcagagaaaaacaaggtgggctgcaatgtattcaagtacaaacttctgagagtccctgggcagcccgaagcatttaaagtatggaagtcaattcagcaatggaaagatggcgtggcatcacgtgttggagtcatcctaccggacctgacgtctggtgcagaaagtcaaccagtttgtcttgttaatgatgtagatgacgagaaaggacctgcctatttcacatatattcctagtttgaagtactcaaaaccttttgtaatgcctagaccctctccgagttgtcactgcgttggcgggtgccaacctggtgactccaattgcgcttgtattcagagtaatggtggctttttgccttatagttcacttggagttcttttgagttacaaagccttgatacatgagtgtggttcggcctgttcatgccctcctaattgccgaaatcgaatgtctcaaggaggtcctaaagctcgtttggaggtcttcaagacaaaaaatagaggttggggactcagatcttgggatcctatacgtggaggtggtttcatttgtgaatatgctggagaagtcatagacgctggtaattacagtgacgacaattacatttttgatgcaacccgtatatatgcgccattggaagccgagcgtgattataatgacgagtctcggaaagtcccttttcccctggtataa

SEQ ID NO: 189 - DNA, 1920 bp, synthetic construct; identical to SEQ ID NO: 187
  misc_feature 1..1920: note = Description of sequence: Mutant, Named: NtHAP2 mutant
  source 1..1920: mol_type = other DNA

SEQ ID NO: 190 - DNA, 1875 bp, synthetic construct; identical to SEQ ID NO: 188
  misc_feature 1..1875: note = Description of sequence: Mutant, Named: NtHAP2 mutant
  source 1..1875: mol_type = other DNA

SEQ ID NO: 191 - DNA, 1944 bp, synthetic construct; identical to SEQ ID NO: 36
  misc_feature 1..1944: note = Description of sequence: Mutant, Named: NtHAP1b mutant
  source 1..1944: mol_type = other DNA

SEQ ID NO: 192 - DNA, 24 bp, synthetic construct
  misc_feature 1..24: note = Description of sequence: Mutant, Named: NtHAP2 mutant
  source 1..24: mol_type = other DNA
atggaacaaggtttgcgttcttga

SEQ ID NO: 193 - DNA, 1875 bp, synthetic construct; identical to SEQ ID NO: 188
  misc_feature 1..1875: note = Description of sequence: Mutant, Named: NtHAP2 mutant
  source 1..1875: mol_type = other DNA

SEQ ID NO: 194 - DNA, 1944 bp, synthetic construct; identical to SEQ ID NO: 54
  misc_feature 1..1944: note = Description of sequence: Mutant, Named: NtHAP1b mutant
  source 1..1944: mol_type = other DNA

SEQ ID NO: 195 - DNA, 1944 bp, synthetic construct; identical to SEQ ID NO: 36
  misc_feature 1..1944: note = Description of sequence: Mutant, Named: NtHAP1b mutant
  source 1..1944: mol_type = other DNA

SEQ ID NO: 196 - DNA, 1875 bp, synthetic construct; identical to SEQ ID NO: 188
  misc_feature 1..1875: note = Description of sequence: Mutant, Named: NtHAP2 mutant
  source 1..1875: mol_type = other DNA

SEQ ID NO: 197 - DNA, 1920 bp, synthetic construct
  misc_feature 1..1920: note = Description of sequence: Mutant, Named: NtHAP2 mutant
  source 1..1920: mol_type = other DNA
atggaacaaggtttgcgttctgagggtaataatcctccgagcatcgataagactagggttttggatgtgaagcctttgagatgtcttgcacctgtttttccatccccaaatggaatgtcttctgtttcaactccacagccatcaccttttgtctgtgttcctcccactggtccgttcccccctggggttgctccattttacccctttgtggctccaaatgagtcgggaaggccaggtgaaagtagtcaacaaactccaagtggggtgccgaatcagggcggcccttttggttttgcgcagcctatatctcccgttcctttaaactcattcagaactccaacaactgcgaatggaaatagtgggaggtccaggagggctgtagacgatgatgattacagtaattcacaggatcagaatgaccaatttgccagtggatttagtgtgcacgtgaataatgttgaagattccggtactggaaaaaaaaggggaagaccgaaaaagcctcggagagctcagcaggctgaggggtcaacccctttggaagtggatgttgaacctttgttgactcagttgctcacgtcttttaaacttgttgacttcgatcaggtcaagaaagctgatggtgacaaggagctagtggggagggtactgttggtttttgacttgttcagaagaaggatgacccaaattgacgaatcgagggatgggtcaggttctggtagaagaccagacctaaaagcttctaatatgctgatgacaaagggagttcggacaaaccaaacaaagaggattggaaatgcacccgggattgaagttggtgacatcttcttcttcaggatggaattgtgcctagtgggattgcatgcgccaactatggctgggatagattatatgagtgtcaaactaacaatggacgaagaacctcttgcggtcagcatagtgtcctctggaggatatgatgatgatggaggtgatggcgatgtattaatttacactggccagggtggagtccagaggaaagacgggcaagtgtttgatcagaaacttgagaggggaaaccttgctctggaaaagagtgtgcatcgagccaatgaagtaagagtaattaggggtgttaaggatgtcgcatatccaaccgggaagatttatatttacgacggactttataagattcaggaatcatgggcagagaaaaacaaggtgggctgcaatgtattcaagtacaaacttctgagagtccctgggcagcccgaagcatttaaagtatggaagtcaattcagcaatggaaagatggcgtggcatcacgtgttggagtcatcctaccggacctgacgtctggtgcagaaagtcaaccagtttgtcttgttaatgatgtagatgacgagaaaggacctgcctatttcacatatattcctagtttgaagtactcaaaaccttttgtaatgcctagaccctctccgagttgtcactgcgttggcgggtgccaacctggtgactccaattgcgcttgtattcagagtaatggtggctttttgccttatagttcacttggagttcttttgagttacaaagccttgatacatgagtgtggttcggcctgttcatgccctcctaattgccgaaatcgaatgtctcaaggaggtcctaaagctcgtttggaggtcttcaagacaaaaaatagaggttggggactcagatcttgggatcctatacgtggaggtggtttcatttgtgaatatgctggagaagtcatagacgctggtaattacagtgacgacaattacatttttgatgcaacccgtatatatgcgccattggaagccgagcgtgattataatgacgagtctcggaaagtcccttttcccctggttcataagtgccaagaatggtggaaatatttctcgctttatgaaccatag

SEQ ID NO: 198 - DNA, 1944 bp, synthetic construct; identical to SEQ ID NO: 35
  misc_feature 1..1944: note = Description of sequence: Mutant, Named: NtHAP1a mutant
  source 1..1944: mol_type = other DNA

SEQ ID NO: 199 - DNA, 1944 bp, synthetic construct; identical to SEQ ID NO: 54
  misc_feature 1..1944: note = Description of sequence: Mutant, Named: NtHAP1b mutant
  source 1..1944: mol_type = other DNA

SEQ ID NO: 200 - DNA, 1920 bp, synthetic construct; identical to SEQ ID NO: 197
  misc_feature 1..1920: note = Description of sequence: Mutant, Named: NtHAP2 mutant
  source 1..1920: mol_type = other DNA

SEQ ID NO: 201 - DNA, 1920 bp, synthetic construct; identical to SEQ ID NO: 187
  misc_feature 1..1920: note = Description of sequence: Mutant, Named: NtHAP2 mutant
  source 1..1920: mol_type = other DNA

SEQ ID NO: 202 - DNA, 1944 bp, synthetic construct; identical to SEQ ID NO: 35
  misc_feature 1..1944: note = Description of sequence: Mutant, Named: NtHAP1a mutant
  source 1..1944: mol_type = other DNA

SEQ ID NO: 203 - DNA, 1944 bp, synthetic construct; identical to SEQ ID NO: 54
  misc_feature 1..1944: note = Description of sequence: Mutant, Named: NtHAP1b mutant
  source 1..1944: mol_type = other DNA

SEQ ID NO: 204 - DNA, 1920 bp, synthetic construct; identical to SEQ ID NO: 197
  misc_feature 1..1920: note = Description of sequence: Mutant, Named: NtHAP2 mutant
  source 1..1920: mol_type = other DNA

SEQ ID NO: 205 - DNA, 1935 bp, synthetic construct
  misc_feature 1..1935: note = Description of sequence: Mutant, Named: NtHAP1b mutant
  source 1..1935: mol_type = other DNA
atggagcaaggctttggttcagactctgttccaccagcagggtccattgacaagtctaaggttttagatgtgaagcctatgagatgtcttatgcctgtttttccatccccaaatggaatgtcgtctgtttcaactcctcaaccctcaccttttgtgtgtgttcctccaagtggtcctttcccaactggggtttctccattttatccatttttggccccgaatgcggccgcaagatcaggtgaaaatcatgaagcttttggttttgggacgcctatatctcctgttcctttaaattcattcagaactccaactgcgaatggagacaccgggccaaggaggcccggcagacctcgcgctacgaatggcttagttgcagaagatgatggtgtcagtgattcacagaatcagagcgaccaattcggcagtggctatagcgtgcacgttaatgatgtagaagacacaagtacagggaaaaaaaggggaagaccgagaaagactaggatgagtcatccagctaattcccatgtcgaagtggatgtcgatccaatactaaatcagctgcttgcatcctttaaacttgtcgagttcgatcaagctaagaaagctgatggcgacaaggagctagttgggcgaatactattggcatttgatgtgtttcgtagaaggttgacccagattgatgagaaaaggggtgagactccaggttctgcaagaaggccggacctaaaggctgctaatttactgatgacaaagggagctcggacaaatcagacaaagagggttggaaatgtacctgggattgaagttggtgacatattcttcttcaggatggaattgtgtctagttggtttgcatgcacctagtatggctgggatagattatatgagtgtcagacttacaggggatgaagagcctattgctgttagcatagtggcctctggaggatatgatgatgaaggggatgatggggatgtgctaatttatactggccagggtggagtccagagaagggatggccaaatgtttgatcagaaacttgagaggggtaatcttgctttggaaaagagtatgcatcgcggcaatgaggtgagagtaattaggggtgttatagatgttacaaatccgagggggaagatttatatgtatgatggcctttacaggatccaggaatcatgggcagagaaaagcaaattgggtgactgcagcattttcaggtacaaattgcttagagtacctgggcagcctgaagcatttacattgtggaaatcaattcaacaatggagggatggaacagcgacacgtgttggagttatcctacctgacctaacatctggcgcagagagtcaacctgtttgtcttgtaaatgatgttgatgatgagaagggacctgcttatttcacatatatccctagtctgaagtactcaaaaccttatatgaagcctaatccgtctatgggttgtcaatgtgttggcggatgccaacctggagggtccgcttgcccttgcattcagaaaaacggaggctttttgccctttagttcacttggagttcttgtgagttacaaaaccttgatacatgagtgtggttctgcctgttcatgccctccgaattgccgaaatcgaatgtctcaaacaggtcctaaagcgcgtgtggaggtcttcaaaacaaaaaatagaggttggggacttaggtcttgggatcccatacgtggaggtggctttatgtgtgaatatgccggagaagtcgttgaagagtctagggtaggtgagcttggcaatgacggtgacgatgattatatatttgatgctacccgcatgtatgagccattggaacctgtgcgtgattataacgacgaatcgaaaaaagtcccgtatccccttgtaataagtgcaaaaaagggtggcaatgttgctcgttttatgaaccatacctaa

SEQ ID NO: 206 - DNA, 1920 bp, synthetic construct; identical to SEQ ID NO: 197
  misc_feature 1..1920: note = Description of sequence: Mutant, Named: NtHAP2 mutant
  source 1..1920: mol_type = other DNA

SEQ ID NO: 207 - DNA, 2088 bp, synthetic construct
  misc_feature 1..2088: note = Description of sequence: Mutant, Named: NtHAP1a mutant
  source 1..2088: mol_type = other DNA
atggatcaaggctttggttcagactctgttccaccagcagggtccattgacaagtctaaggttttagatgttaagcctatgagatgtcttatgcctgtttttccatccccaaatggaatgtcatctgtttcaactcctcaaccctcaccttttgtgtgtgttcctccaagtggtcctttcccacctggggtttctccgttttatccatttttggccccaaatggatccggaagatcaggtgaaaatcaggaatcttttggttttgggacgcctatatctccagttcctttaaattcattcagaactccaactgcgaatggagacactgggccaaggaggcccggcagacctcgtgctacgaatgtcttagctgcagaagatgatggtgtctctgattcacagaatcagagcgaccaattcggcagtggctatagcgtgcacgttaatgatgtagaagacacaagtacaggaaaaaaaaggggaagaccgagaaagactaggatgagtcatccagctaactcccatgtcgaagtggatgtcgatccaatactaaatcagctgcttgcgtcctttaaacttgtcgatgtcgatcaggttaagaaagctgatggtgataaggagctagttgggcgaatactattggcatttgatgtgtttcgtagaaggttgacccagattgatgagaaaaggggtgagactccaggttctgcaagaaggccggacctaaaggctgctaatttgctgatgacaaggggagctcggacaaatcagacaaagaggattggaaatgtacctgggattgaagttggtgacatattcttcttcaggatggaattgtgcctagttggtttgcatgcacctagtatggctgggatagattatatgagtgtcagacttacaggggatgaagagcctattgctgttagcatagtggcctctggaggatatgatgatgaaggggatgatggggatgtgctaatttatactggccagggtggagttcagagacgagatggccaaatgtttgatcagaaacttgagaggggtaatcttgctttggaaaagagtatgcatcgcggaaatgaggtgagagtaattaggggtgttatagatgttacaaatccgagggggaagatttatatgtatgatggcctttacaggatccaggaatcatgggcagagaaaagcaaattgggcgactgcagcattttcaggtacaaattgcttagagtacctgggcagcctgaagcatttacattgtggaaatcaattcagcaatggagggatggaacagcgacacgtgttggagttatcctacctgacctaacatctggtgcagagagtcaacctgtttgtcttgtaaatgatgttgatgatgagaagggacctgcttatttcacatatatccctagtctgaagtactcaaaaccttatatgaagcctaatccatccatgggttgtcaatgtgttggcggatgccaacctggagggtccacttgcccttgcattcagaaaaacggaggctttttgccctttagttcacttggagttcttgtgagttacaaaaccttgatacatgactgtggttctgcctgttcatgccctccgaattgccgaaatcgaatgtctcaagcaggtcctaaagcgcgtgtggaggtcttcaaaacaaaaaatagaggttggggacttaggtcttgggatcccatacgtggaggtggctttatttgtgaatatgccggagaagtcgttgaagagtctagggtaggtgagcttggcaatgacggtgacgatgattatatatttgatgctacccgcatgtatgagccattggaacctgtgcgtgattataacgatgtatcgaaaaaggtcccgtatccccttgtttgttcacctaacgtattctggcagcttgttgtacgtgaaaataacaatgagacatactactacattgccttttttgccattaggcatattcctcccatgcaagaattgacttttgattatggcatggttccaccagacaaagcagatcgtaggaggaagaagtgcttgtgtgggtcattgaactgcagaggttacttttactag

SEQ ID NO: 208 - DNA, 1875 bp, synthetic construct
  misc_feature 1..1875: note = Description of sequence: Mutant, Named: NtHAP2 mutant
  source 1..1875: mol_type = other DNA
atggaacaaggtttgcgttctgagggtaataatcctccgagcatcgataagactagggttttggatgtgaagcctttgagatgtcttgcacctgtttttccatccccaaatggaatgtcttctgtttcaactccacagccatcaccttttgtctgtgttcctcccactggtccgttcccccctggggttgctccattttacccctttgtggctccaaatgagtcgggaaggccaggtgaaagtagtcaacaaactccaagtggggtgccgaatcagggcggcccttttggttttgcgcagcctatatctcccgttcctttaaactcattcagaactccaacaactgcgaatggaaatagtgggaggtccaggagggctgtagacgatgatgattacagtaattcacaggatcagaatgaccaatttgccagtggatttagtgtgcacgtgaataatgttgaagattccggtactggaaaaaaaaggggaagaccgaaaaagcctcggagagctcagcaggctgaggggtcaacccctttggaagtggatgttgaacctttgttgactcagttgctcacgtcttttaaacttgttgacttcgatcaggtcaagaaagctgatggtgacaaggagctagtggggagggtactgttggtttttgacttgttcagaagaaggatgacccaaattgacgaatcgagggatgggtcaggttctggtagaagaccagacctaaaagcttctaatatgctgatgacaaagggagttcggacaaaccaaacaaagaggattggaaatgcacccgggattgaagttggtgacatcttcttcttcaggatggaattgtgcctagtgggattgcatgcgccaactatggctgggatagattatatgagtgtcaaactaacaatggacgaagaacctcttgcggtcagcatagtgtcctctggaggatatgatgatgatggaggtgatggcgatgtattaatttacactggccagggtggagtccagaggaaagacgggcaagtgtttgatcagaaacttgagaggggaaaccttgctctggaaaagagtgtgcatcgagccaatgaagtaagagtaattaggggtgttaaggatgtcgcatatccaaccgggaagatttatatttacgacggactttataagattcaggaatcatgggcagagaaaaacaaggtgggctgcaatgtattcaagtacaaacttctgagagtccctgggcagcccgaagcatttaaagtatggaagtcaattcagcaatggaaagatggcgtggcatcacgtgttggagtcatcctaccggacctgacgtctggtgcagaaagtcaaccagtttgtcttgttaatgatgtagatgacgagaaaggacctgcctatttcacatatattcctagtttgaagtactcaaaaccttttgtaatgcctagaccctctccgagttgtcactgcgttggcgggtgccaacctggtgactccaattgcgcttgtattcagagtaatggtggctttttgccttatagttcacttggagttcttttgagttacaaagccttgatacatgagtgtggttcggcctgttcatgccctcctaattgccgaaatcgaatgtctcaaggaggtcctaaagctcgtttggaggtcttcaagacaaaaaatagaggttggggactcagatcttgggatcctatacgtggaggtggtttcatttgtgaatatgctggagaagtcatagacgctggtaattacagtgacgacaattacatttttgatgcaacccgtatatatgcgccattggaagccgagcgtgattataatgacgagtctcggaaagtcccttttcccctggcataa

SEQ ID NO: 209 - DNA, 1944 bp, synthetic construct; identical to SEQ ID NO: 34
  misc_feature 1..1944: note = Description of sequence: Mutant, Named: NtHAP1a mutant
  source 1..1944: mol_type = other DNA

SEQ ID NO: 210 - DNA, 1944 bp, synthetic construct; identical to SEQ ID NO: 54
  misc_feature 1..1944: note = Description of sequence: Mutant, Named: NtHAP1b mutant
  source 1..1944: mol_type = other DNA

SEQ ID NO: 211 - DNA, 1905 bp, synthetic construct
  misc_feature 1..1905: note = Description of sequence: Mutant, Named: NtHAP2 mutant
  source 1..1905: mol_type = other DNA
atggaacaaggtttgcgttctgagggtaataatcctccgagcatcgataagactagggttttggatgtgaagcctttgagatgtcttgcacctgtttttccatccccaaatggaatgtcttctgtttcaactccacagccatcaccttttgtctgtgttcctcccactggtccgttcccccctggggttgctccattttacccctttgtggctccaaatgagtcgggaaggccaggtgaaagtagtcaacaaactccaagtggggtgccgaatcagggcggcccttttggttttgcgcagcctatatctcccgttcctttaaactcattcagaactccaacaactgcgaatggaaatagtgggaggtccaggagggctgtagacgatgatgattacagtaattcacaggatcagaatgaccaatttgccagtggatttagtgtgcacgtgaataatgttgaagattccggtactggaaaaaaaaggggaagaccgaaaaagcctcggagagctcagcaggctgaggggtcaacccctttggaagtggatgttgaacctttgttgactcagttgctcacgtcttttaaacttgttgacttcgatcaggtcaagaaagctgatggtgacaaggagctagtggggagggtactgttggtttttgacttgttcagaagaaggatgacccaaattgacgaatcgagggatgggtcaggttctggtagaagaccagacctaaaagcttctaatatgctgatgacaaagggagttcggacaaaccaaacaaagaggattggaaatgcacccgggattgaagttggtgacatcttcttcttcaggatggaattgtgcctagtgggattgcatgcgccaactatggctgggatagattatatgagtgtcaaactaacaatggacgaagaacctcttgcggtcagcatagtgtcctctggaggatatgatgatgatggaggtgatggcgatgtattaatttacactggccagggtggagtccagaggaaagacgggcaagtgtttgatcagaaacttgagaggggaaaccttgctctggaaaagagtgtgcatcgagccaatgaagtaagagtaattaggggtgttaaggatgtcgcatatccaaccgggaagatttatatttacgacggactttataagattcaggaatcatgggcagagaaaaacaaggtgggctgcaatgtattcaagtacaaacttctgagagtccctgggcagcccgaagcatttaaagtatggaagtcaattcagcaatggaaagatggcgtggcatcacgtgttggagtcatcctaccggacctgacgtctggtgcagaaagtcaaccagtttgtcttgttaatgatgtagatgacgagaaaggacctgcctatttcacatatattcctagtttgaagtactcaaaaccttttgtaatgcctagaccctctccgagttgtcactgcgttggcgggtgccaacctggtgactccaattgcgcttgtattcagagtaatggtggctttttgccttatagttcacttggagttcttttgagttacaaagccttgatacatgagtgtggttcggcctgttcatgccctcctaattgccgaaatcgaatgtctcaaggaggtcctaaagctcgtttggaggtcttcaagacaaaaaatagaggttggggactcagatcttgggatcctatacgtggaggtggtttcatttgtgaatatgctggagaagtcatagacgctggtaattacagtgacgacaattacatttttgatgcaacccgtatatatgcgccattggaagccgagcgtgattataatgacgagtctcggaaagtcccttttcccctggtgccaagaatggtggaaatatttctcgctttatga

SEQ ID NO: 212 - DNA, 1920 bp, synthetic construct; identical to SEQ ID NO: 187
  misc_feature 1..1920: note = Description of sequence: Mutant, Named: NtHAP2 mutant
  source 1..1920: mol_type = other DNA

SEQ ID NO: 213 - DNA, 1920 bp, synthetic construct; identical to SEQ ID NO: 197
  misc_feature 1..1920: note = Description of sequence: Mutant, Named: NtHAP2 mutant
  source 1..1920: mol_type = other DNA

SEQ ID NO: 214 - DNA, 1920 bp, synthetic construct; identical to SEQ ID NO: 187
  misc_feature 1..1920: note = Description of sequence: Mutant, Named: NtHAP2 mutant
  source 1..1920: mol_type = other DNA

SEQ ID NO: 215 - DNA, 2133 bp, synthetic construct
  misc_feature 1..2133: note = Description of sequence: Mutant, Named: NtHAP1a mutant
  source 1..2133: mol_type = other DNA
atggatcaaggctttggttcagactctgttccaccagcagggtccattgacaagtctaaggttttagatgttaagcctatgagatgtcttatgcctgtttttccatccccaaatggaatgtcatctgtttcaactcctcaaccctcaccttttgtgtgtgttcctccaagtggtcctttcccacctggggtttctccgttttatccatttttggccccaaatggatccggaagatcaggtgaaaatcaggaatcttttggttttgggacgcctatatctccagttcctttaaattcattcagaactccaactgcgaatggagacactgggccaaggaggcccggcagacctcgtgctacgaatgtcttagctgcagaagatgatggtgtctctgattcacagaatcagagcgaccaattcggcagtggctatagcgtgcacgttaatgatgtagaagacacaagtacaggaaaaaaaaggggaagaccgagaaagactaggatgagtcatccagctaactcccatgtcgaagtggatgtcgatccaatactaaatcagctgcttgcgtcctttaaacttgtcgatgtcgatcaggttaagaaagctgatggtgataaggagctagttgggcgaatactattggcatttgatgtgtttcgtagaaggttgacccagattgatgagaaaaggggtgagactccaggttctgcaagaaggccggacctaaaggctgctaatttgctgatgacaaggggagctcggacaaatcagacaaagaggattggaaatgtacctgggattgaagttggtgacatattcttcttcaggatggaattgtgcctagttggtttgcatgcacctagtatggctgggatagattatatgagtgtcagacttacaggggatgaagagcctattgctgttagcatagtggcctctggaggatatgatgatgaaggggatgatggggatgtgctaatttatactggccagggtggagttcagagacgagatggccaaatgtttgatcagaaacttgagaggggtaatcttgctttggaaaagagtatgcatcgcggaaatgaggtgagagtaattaggggtgttatagatgttacaaatccgagggggaagatttatatgtatgatggcctttacaggatccaggaatcatgggcagagaaaagcaaattgggcgactgcagcattttcaggtacaaattgcttagagtacctgggcagcctgaagcatttacattgtggaaatcaattcagcaatggagggatggaacagcgacacgtgttggagttatcctacctgacctaacatctggtgcagagagtcaacctgtttgtcttgtaaatgatgttgatgatgagaagggacctgcttatttcacatatatccctagtctgaagtactcaaaaccttatatgaagcctaatccatccatgggttgtcaatgtgttggcggatgccaacctggagggtccacttgcccttgcattcagaaaaacggaggctttttgccctttagttcacttggagttcttgtgagttacaaaaccttgatacatgactgtggttctgcctgttcatgccctccgaattgccgaaatcgaatgtctcaagcaggtcctaaagcgcgtgtggaggtcttcaaaacaaaaaatagaggttggggacttaggtcttgggatcccatacgtggaggtggctttatttgtgaatatgccggagaagtcgttgaagagtctagggtaggtgagcttggcaatgacggtgacgatgattatatatttgatgctacccgcatgtatgagccattggaacctgtgcgtgattataacgatgtatcgaaaaaggtcccgtatccccttgtaataagtgcaaaaaagggtggcaatgttgctcgttttatgaaccattgttcacctaacgtattctggcagcttgttgtacgtgaaaataacaatgagacatactactacattgccttttttgccattaggcatattcctcccatgcaagaattgacttttgattatggcatggttccaccagacaaagcagatcgtaggaggaagaagtgcttgtgtgggtcattgaactgcagaggttacttttactag

SEQ ID NO: 216 - DNA, 1944 bp, synthetic construct; identical to SEQ ID NO: 35
  misc_feature 1..1944: note = Description of sequence: Mutant, Named: NtHAP1a mutant
  source 1..1944: mol_type = other DNA

SEQ ID NO: 217 - DNA, 1920 bp, synthetic construct; identical to SEQ ID NO: 187
  misc_feature 1..1920: note = Description of sequence: Mutant, Named: NtHAP2 mutant
  source 1..1920: mol_type = other DNA

SEQ ID NO: 218 - DNA, 1944 bp, synthetic construct; identical to SEQ ID NO: 36
  misc_feature 1..1944: note = Description of sequence: Mutant, Named: NtHAP1b mutant
  source 1..1944: mol_type = other DNA

SEQ ID NO: 219 - DNA, 24 bp, synthetic construct
  misc_feature 1..24: note = Description of sequence: Mutant, Named: NtHAP2 mutant
  source 1..24: mol_type = other DNA
atggaacaaggtttgcgttcttga

SEQ ID NO: 220 - DNA, 1875 bp, synthetic construct; identical to SEQ ID NO: 188
  misc_feature 1..1875: note = Description of sequence: Mutant, Named: NtHAP2 mutant
  source 1..1875: mol_type = other DNA

SEQ ID NO: 221 - DNA, 1944 bp, synthetic construct; identical to SEQ ID NO: 35
  misc_feature 1..1944: note = Description of sequence: Mutant, Named: NtHAP1a mutant
  source 1..1944: mol_type = other DNA

SEQ ID NO: 222 - DNA, 1944 bp, synthetic construct; identical to SEQ ID NO: 36
  misc_feature 1..1944: note = Description of sequence: Mutant, Named: NtHAP1a mutant
  source 1..1944: mol_type = other DNA

SEQ ID NO: 223 - DNA, 2139 bp, synthetic construct; identical to SEQ ID NO: 69
  misc_feature 1..2139: note = Description of sequence: Mutant, Named: NtHAP1a mutant
  source 1..2139: mol_type = other DNA

SEQ ID NO: 224 - DNA, 2085 bp, synthetic construct; identical to SEQ ID NO: 67
  misc_feature 1..2085: note = Description of sequence: Mutant, Named: NtHAP1a mutant
  source 1..2085: mol_type = other DNA

SEQ ID NO: 225 - DNA, 2106 bp, synthetic construct
  misc_feature 1..2106: note = Description of sequence: Mutant, Named: NtHAP1a mutant
  source 1..2106: mol_type = other DNA
atggatcaaggctttggttcagactctgttccaccagcagggtccattgacaagtctaaggttttagatgttaagcctatgagatgtcttatgcctgtttttccatccccaaatggaatgtcatctgtttcaactcctcaaccctcaccttttgtgtgtgttcctccaagtggtcctttcccacctggggtttctccgttttatccatttttggccccaaatggatccggaagatcaggtgaaaatcaggaatcttttggttttgggacgcctatatctccagttcctttaaattcattcagaactccaactgcgaatggagacactgggccaaggaggcccggcagacctcgtgctacgaatgtcttagctgcagaagatgatggtgtctctgattcacagaatcagagcgaccaattcggcagtggctatagcgtgcacgttaatgatgtagaagacacaagtacaggaaaaaaaaggggaagaccgagaaagactaggatgagtcatccagctaactcccatgtcgaagtggatgtcgatccaatactaaatcagctgcttgcgtcctttaaacttgtcgatgtcgatcaggttaagaaagctgatggtgataaggagctagttgggcgaatactattggcatttgatgtgtttcgtagaaggttgacccagattgatgagaaaaggggtgagactccaggttctgcaagaaggccggacctaaaggctgctaatttgctgatgacaaggggagctcggacaaatcagacaaagaggattggaaatgtacctgggattgaagttggtgacatattcttcttcaggatggaattgtgcctagttggtttgcatgcacctagtatggctgggatagattatatgagtgtcagacttacaggggatgaagagcctattgctgttagcatagtggcctctggaggatatgatgatgaaggggatgatggggatgtgctaatttatactggccagggtggagttcagagacgagatggccaaatgtttgatcagaaacttgagaggggtaatcttgctttggaaaagagtatgcatcgcggaaatgaggtgagagtaattaggggtgttatagatgttacaaatccgagggggaagatttatatgtatgatggcctttacaggatccaggaatcatgggcagagaaaagcaaattgggcgactgcagcattttcaggtacaaattgcttagagtacctgggcagcctgaagcatttacattgtggaaatcaattcagcaatggagggatggaacagcgacacgtgttggagttatcctacctgacctaacatctggtgcagagagtcaacctgtttgtcttgtaaatgatgttgatgatgagaagggacctgcttatttcacatatatccctagtctgaagtactcaaaaccttatatgaagcctaatccatccatgggttgtcaatgtgttggcggatgccaacctggagggtccacttgcccttgcattcagaaaaacggaggctttttgccctttagttcacttggagttcttgtgagttacaaaaccttgatacatgactgtggttctgcctgttcatgccctccgaattgccgaaatcgaatgtctcaagcaggtcctaaagcgcgtgtggaggtcttcaaaacaaaaaatagaggttggggacttaggtcttgggatcccatacgtggaggtggctttatttgtgaatatgccggagaagtcgttgaagagtctagggtaggtgagcttggcaatgacggtgacgatgattatatatttgatgctacccgcatgtatgagccattggaacctgtgcgtgattataacgatgtatcgaaaaaggtcccgtatccccttgtaataagtgcaaaaaagggtggcaatgttgctcgttttatgaaccatagttgttcacctaacgtattctggcagcttgttgtacgtgaaaataacaatgagacatactactacattgccttttttgccattaggcatattcctcccatgcaagaattgacttttgattatggcatggttccaccagacaacgtaggaggaagaagtgcttgtgtgggtcattga

SEQ ID NO: 226 - DNA, 2082 bp, synthetic construct
  misc_feature 1..2082: note = Description of sequence: Mutant, Named: NtHAP1a mutant
  source 1..2082: mol_type = other DNA
atggatcaaggctttggttcagactctgttccaccagcagggtccattgacaagtctaaggttttagatgttaagcctatgagatgtcttatgcctgtttttccatccccaaatggaatgtcatctgtttcaactcctcaaccctcaccttttgtgtgtgttcctccaagtggtcctttcccacctggggtttctccgttttatccatttttggccccaaatggatccggaagatcaggtgaaaatcaggaatcttttggttttgggacgcctatatctccagttcctttaaattcattcagaactccaactgcgaatggagacactgggccaaggaggcccggcagacctcgtgctacgaatgtcttagctgcagaagatgatggtgtctctgattcacagaatcagagcgaccaattcggcagtggctatagcgtgcacgttaatgatgtagaagacacaagtacaggaaaaaaaaggggaagaccgagaaagactaggatgagtcatccagctaactcccatgtcgaagtggatgtcgatccaatactaaatcagctgcttgcgtcctttaaacttgtcgatgtcgatcaggttaagaaagctgatggtgataaggagctagttgggcgaatactattggcatttgatgtgtttcgtagaaggttgacccagattgatgagaaaaggggtgagactccaggttctgcaagaaggccggacctaaaggctgctaatttgctgatgacaaggggagctcggacaaatcagacaaagaggattggaaatgtacctgggattgaagttggtgacatattcttcttcaggatggaattgtgcctagttggtttgcatgcacctagtatggctgggatagattatatgagtgtcagacttacaggggatgaagagcctattgctgttagcatagtggcctctggaggatatgatgatgaaggggatgatggggatgtgctaatttatactggccagggtggagttcagagacgagatggccaaatgtttgatcagaaacttgagaggggtaatcttgctttggaaaagagtatgcatcgcggaaatgaggtgagagtaattaggggtgttatagatgttacaaatccgagggggaagatttatatgtatgatggcctttacaggatccaggaatcatgggcagagaaaagcaaattgggcgactgcagcattttcaggtacaaattgcttagagtacctgggcagcctgaagcatttacattgtggaaatcaattcagcaatggagggatggaacagcgacacgtgttggagttatcctacctgacctaacatctggtgcagagagtcaacctgtttgtcttgtaaatgatgttgatgatgagaagggacctgcttatttcacatatatccctagtctgaagtactcaaaaccttatatgaagcctaatccatccatgggttgtcaatgtgttggcggatgccaacctggagggtccacttgcccttgcattcagaaaaacggaggctttttgccctttagttcacttggagttcttgtgagttacaaaaccttgatacatgactgtggttctgcctgttcatgccctccgaattgccgaaatcgaatgtctcaagcaggtcctaaagcgcgtgtggaggtcttcaaaacaaaaaatagaggttggggacttaggtcttgggatcccatacgtggaggtggctttatttgtgaatatgccggagaagtcgttgaagagtctagggtaggtgagcttggcaatgacggtgacgatgattatatatttgatgctacccgcatgtatgagccattggaacctgtgcgtgattataacgatgtatcgaaaaaggtcccgtatccccttgtaataagtgcaaaaaagggtggcaatgttgctcgttttatgaaccatagttgttcacctaacgtattctggcagcttgttgtacgtgaaaataacaatgagacatactactacattgccttttttgccattaggcatattcctcccatgcaagaattgacttttttgccattaggaagaagtgcttgtgtgggtcattga

SEQ ID NO: 227 - DNA, 2082 bp, synthetic construct; identical to SEQ ID NO: 226
  misc_feature 1..2082: note = Description of sequence: Mutant, Named: NtHAP1a mutant
  source 1..2082: mol_type = other DNA

SEQ ID NO: 228 - DNA, 2082 bp, synthetic construct; identical to SEQ ID NO: 226
  misc_feature 1..2082: note = Description of sequence: Mutant, Named: NtHAP1a mutant
  source 1..2082: mol_type = other DNA

SEQ ID NO: 229 - DNA, 2082 bp, synthetic construct; identical to SEQ ID NO: 226
  misc_feature 1..2082: note = Description of sequence: Mutant, Named: NtHAP1a mutant
  source 1..2082: mol_type = other DNA

SEQ ID NO: 230 - DNA, 2085 bp, synthetic construct; identical to SEQ ID NO: 67
  misc_feature 1..2085: note = Description of sequence: Mutant, Named: NtHAP1a mutant
  source 1..2085: mol_type = other DNA

SEQ ID NO: 231 - DNA, 2082 bp, synthetic construct; identical to SEQ ID NO: 226
  misc_feature 1..2082: note = Description of sequence: Mutant, Named: NtHAP1a mutant
  source 1..2082: mol_type = other DNA

SEQ ID NO: 232 - DNA, 2082 bp, synthetic construct; identical to SEQ ID NO: 226
  misc_feature 1..2082: note = Description of sequence: Mutant, Named: NtHAP1a mutant
  source 1..2082: mol_type = other DNA

SEQ ID NO: 233 - DNA, 2106 bp, synthetic construct; identical to SEQ ID NO: 225
  misc_feature 1..2106: note = Description of sequence: Mutant, Named: NtHAP1a mutant
  source 1..2106: mol_type = other DNA

SEQ ID NO: 234 - DNA, 2016 bp, synthetic construct
  misc_feature 1..2016: note = Description of sequence: Mutant, Named: NtHAP1a mutant
  source 1..2016: mol_type = other DNA
atggatcaaggctttggttcagactctgttccaccagcagggtccattgacaagtctaaggttttagatgttaagcctatgagatgtcttatgcctgtttttccatccccaaatggaatgtcatctgtttcaactcctcaaccctcaccttttgtgtgtgttcctccaagtggtcctttcccacctggggtttctccgttttatccatttttggccccaaatggatccggaagatcaggtgaaaatcaggaatcttttggttttgggacgcctatatctccagttcctttaaattcattcagaactccaactgcgaatggagacactgggccaaggaggcccggcagacctcgtgctacgaatgtcttagctgcagaagatgatggtgtctctgattcacagaatcagagcgaccaattcggcagtggctatagcgtgcacgttaatgatgtagaagacacaagtacaggaaaaaaaaggggaagaccgagaaagactaggatgagtcatccagctaactcccatgtcgaagtggatgtcgatccaatactaaatcagctgcttgcgtcctttaaacttgtcgatgtcgatcaggttaagaaagctgatggtgataaggagctagttgggcgaatactattggcatttgatgtgtttcgtagaaggttgacccagattgatgagaaaaggggtgagactccaggttctgcaagaaggccggacctaaaggctgctaatttgctgatgacaaggggagctcggacaaatcagacaaagaggattggaaatgtacctgggattgaagttggtgacatattcttcttcaggatggaattgtgcctagttggtttgcatgcacctagtatggctgggatagattatatgagtgtcagacttacaggggatgaagagcctattgctgttagcatagtggcctctggaggatatgatgatgaaggggatgatggggatgtgctaatttatactggccagggtggagttcagagacgagatggccaaatgtttgatcagaaacttgagaggggtaatcttgctttggaaaagagtatgcatcgcggaaatgaggtgagagtaattaggggtgttatagatgttacaaatccgagggggaagatttatatgtatgatggcctttacaggatccaggaatcatgggcagagaaaagcaaattgggcgactgcagcattttcaggtacaaattgcttagagtacctgggcagcctgaagcatttacattgtggaaatcaattcagcaatggagggatggaacagcgacacgtgttggagttatcctacctgacctaacatctggtgcagagagtcaacctgtttgtcttgtaaatgatgttgatgatgagaagggacctgcttatttcacatatatccctagtctgaagtactcaaaaccttatatgaagcctaatccatccatgggttgtcaatgtgttggcggatgccaacctggagggtccacttgcccttgcattcagaaaaacggaggctttttgccctttagttcacttggagttcttgtgagttacaaaaccttgatacatgactgtggttctgcctgttcatgccctccgaattgccgaaatcgaatgtctcaagcaggtcctaaagcgcgtgtggaggtcttcaaaacaaaaaatagaggttggggacttaggtcttgggatcccatacgtggaggtggctttatttgtgaatatgccggagaagtcgttgaagagtctagggtaggtgagcttggcaatgacggtgacgatgattatatatttgatgctacccgcatgtatgagccattggaacctgtgcgtgattataacgatgtatcgaaaaaggtcccgtatccccttgtaataagtgcaaaaaagggtggcaatgttgctcgttttatgaaccatagttgttcacctaacgtattctggcagcttgttgtacgtgaaaataacaatgagacatactactacattgcctttttttgccattag

SEQ ID NO: 235 - DNA, 2016 bp, synthetic construct; identical to SEQ ID NO: 234
  misc_feature 1..2016: note = Description of sequence: Mutant, Named: NtHAP1a mutant
  source 1..2016: mol_type = other DNA

SEQ ID NO: 236 - DNA, 2016 bp, synthetic construct; identical to SEQ ID NO: 234
  misc_feature 1..2016: note = Description of sequence: Mutant, Named: NtHAP1a mutant
  source 1..2016: mol_type = other DNA

SEQ ID NO: 237 - DNA, 2016 bp, synthetic construct; identical to SEQ ID NO: 234
  misc_feature 1..2016: note = Description of sequence: Mutant, Named: NtHAP1a mutant
  source 1..2016: mol_type = other DNA

SEQ ID NO: 238 - DNA, 2085 bp, synthetic construct; identical to SEQ ID NO: 67
  misc_feature 1..2085: note = Description of sequence: Mutant, Named: NtHAP1a mutant
  source 1..2085: mol_type = other DNA

SEQ ID NO: 239 - DNA, 2016 bp, synthetic construct; identical to SEQ ID NO: 234
  misc_feature 1..2016: note = Description of sequence: Mutant, Named: NtHAP1a mutant
  source 1..2016: mol_type = other DNA

SEQ ID NO: 240 - DNA, 2016 bp, synthetic construct; identical to SEQ ID NO: 234
  misc_feature 1..2016: note = Description of sequence: Mutant, Named: NtHAP1a mutant
  source 1..2016: mol_type = other DNA

SEQ ID NO: 241 - DNA, 2016 bp, synthetic construct; identical to SEQ ID NO: 234
  misc_feature 1..2016: note = Description of sequence: Mutant, Named: NtHAP1a mutant
  source 1..2016: mol_type = other DNA

SEQ ID NO: 242 - DNA, 2016 bp, synthetic construct; identical to SEQ ID NO: 234
  misc_feature 1..2016: note = Description of sequence: Mutant, Named: NtHAP1a mutant
  source 1..2016: mol_type = other DNA

SEQ ID NO: 243 - DNA, 2085 bp, synthetic construct; identical to SEQ ID NO: 67
  misc_feature 1..2085: note = Description of sequence: Mutant, Named: NtHAP1a mutant
  source 1..2085: mol_type = other DNA

SEQ ID NO: 244 - DNA, 2016 bp, synthetic construct; identical to SEQ ID NO: 234
  misc_feature 1..2016: note = Description of sequence: Mutant, Named: NtHAP1a mutant
  source 1..2016: mol_type = other DNA

SEQ ID NO: 245 - DNA, 2016 bp, synthetic construct; identical to SEQ ID NO: 234
  misc_feature 1..2016: note = Description of sequence: Mutant, Named: NtHAP1a mutant
  source 1..2016: mol_type = other DNA

SEQ ID NO: 246 - DNA, 2016 bp, synthetic construct; identical to SEQ ID NO: 234
  misc_feature 1..2016: note = Description of sequence: Mutant, Named: NtHAP1a mutant
  source 1..2016: mol_type = other DNA

SEQ ID NO: 247 - DNA, 2016 bp, synthetic construct; identical to SEQ ID NO: 234
  misc_feature 1..2016: note = Description of sequence: Mutant, Named: NtHAP1a mutant
  source 1..2016: mol_type = other DNA

SEQ ID NO: 248 - DNA, 2085 bp, synthetic construct; identical to SEQ ID NO: 67
  misc_feature 1..2085: note = Description of sequence: Mutant, Named: NtHAP1a mutant
  source 1..2085: mol_type = other DNA

SEQ ID NO: 249 - DNA, 2016 bp, synthetic construct; identical to SEQ ID NO: 234
  misc_feature 1..2016: note = Description of sequence: Mutant, Named: NtHAP1a mutant
  source 1..2016: mol_type = other DNA

SEQ ID NO: 250 - DNA, 2016 bp, synthetic construct; identical to SEQ ID NO: 234
  misc_feature 1..2016: note = Description of sequence: Mutant, Named: NtHAP1a mutant
  source 1..2016: mol_type = other DNA

SEQ ID NO: 251 - DNA, 2016 bp, synthetic construct; identical to SEQ ID NO: 234
  misc_feature 1..2016: note = Description of sequence: Mutant, Named: NtHAP1a mutant
  source 1..2016: mol_type = other DNA

SEQ ID NO: 252 - DNA, 2016 bp, synthetic construct; identical to SEQ ID NO: 234
  misc_feature 1..2016: note = Description of sequence: Mutant, Named: NtHAP1a mutant
  source 1..2016: mol_type = other DNA

SEQ ID NO: 253 - DNA, 2085 bp, synthetic construct; identical to SEQ ID NO: 67
  misc_feature 1..2085: note = Description of sequence: Mutant, Named: NtHAP1a mutant
  source 1..2085: mol_type = other DNA

SEQ ID NO: 254 - DNA, 2016 bp, synthetic construct; identical to SEQ ID NO: 234
  misc_feature 1..2016: note = Description of sequence: Mutant, Named: NtHAP1a mutant
  source 1..2016: mol_type = other DNA

SEQ ID NO: 255 - DNA, 2016 bp, synthetic construct; identical to SEQ ID NO: 234
  misc_feature 1..2016: note = Description of sequence: Mutant, Named: NtHAP1a mutant
  source 1..2016: mol_type = other DNA

SEQ ID NO: 256 - DNA, 2016 bp, synthetic construct; identical to SEQ ID NO: 234
  misc_feature 1..2016: note = Description of sequence: Mutant, Named: NtHAP1a mutant
  source 1..2016: mol_type = other DNA

SEQ ID NO: 257 - DNA, 2016 bp, synthetic construct; identical to SEQ ID NO: 234
  misc_feature 1..2016: note = Description of sequence: Mutant, Named: NtHAP1a mutant
  source 1..2016: mol_type = other DNA

SEQ ID NO: 258 - DNA, 2085 bp, synthetic construct; identical to SEQ ID NO: 67
  misc_feature 1..2085: note = Description of sequence: Mutant, Named: NtHAP1a mutant
  source 1..2085: mol_type = other DNA

SEQ ID NO: 259 - DNA, 2016 bp, synthetic construct; identical to SEQ ID NO: 234
  misc_feature 1..2016: note = Description of sequence: Mutant, Named: NtHAP1a mutant
  source 1..2016: mol_type = other DNA

SEQ ID NO: 260 - DNA, 2016 bp, synthetic construct; identical to SEQ ID NO: 234
  misc_feature 1..2016: note = Description of sequence: Mutant, Named: NtHAP1a mutant
  source 1..2016: mol_type = other DNA

SEQ ID NO: 261 - DNA, 2016 bp, synthetic construct; identical to SEQ ID NO: 234
  misc_feature 1..2016: note = Description of sequence: Mutant, Named: NtHAP1a mutant
  source 1..2016: mol_type = other DNA

SEQ ID NO: 262 - DNA, 2016 bp, synthetic construct; identical to SEQ ID NO: 234
  misc_feature 1..2016: note = Description of sequence: Mutant, Named: NtHAP1a mutant
  source 1..2016: mol_type = other DNA

SEQ ID NO: 263 - DNA, 2085 bp, synthetic construct; identical to SEQ ID NO: 67
  misc_feature 1..2085: note = Description of sequence: Mutant, Named: NtHAP1a mutant
  source 1..2085: mol_type = other DNA

SEQ ID NO: 264 - DNA, 2085 bp, synthetic construct; identical to SEQ ID NO: 63
  misc_feature 1..2085: note = Description of sequence: Mutant, Named: NtHAP1a mutant
  source 1..2085: mol_type = other DNA

SEQ ID NO: 265 - DNA, 2016 bp, synthetic construct; identical to SEQ ID NO: 234
  misc_feature 1..2016: note = Description of sequence: Mutant, Named: NtHAP1a mutant
  source 1..2016: mol_type = other DNA

SEQ ID NO: 266 - DNA, 2016 bp, synthetic construct; identical to SEQ ID NO: 234
  misc_feature 1..2016: note = Description of sequence: Mutant, Named: NtHAP1a mutant
  source 1..2016: mol_type = other DNA

SEQ ID NO: 267 - DNA, 2016 bp, synthetic construct; identical to SEQ ID NO: 234
  misc_feature 1..2016: note = Description of sequence: Mutant, Named: NtHAP1a mutant
  source 1..2016: mol_type = other DNA

SEQ ID NO: 268 - DNA, 2016 bp, synthetic construct; identical to SEQ ID NO: 234
  misc_feature 1..2016: note = Description of sequence: Mutant, Named: NtHAP1a mutant
  source 1..2016: mol_type = other DNA

SEQ ID NO: 269 - DNA, 2085 bp, synthetic construct; identical to SEQ ID NO: 67
  misc_feature 1..2085: note = Description of sequence: Mutant, Named: NtHAP1a mutant
  source 1..2085: mol_type = other DNA

SEQ ID NO: 270 - DNA, 2085 bp, synthetic construct
  misc_feature 1..2085: note = Description of sequence: Mutant, Named: NtHAP1b mutant
  source 1..2085: mol_type = other DNA
atggagcaaggctttggttcagactctgttccaccagcagggtccattgacaagtctaaggttttagatgtgaagcctatgagatgtcttatgcctgtttttccatccccaaatggaatgtcgtctgtttcaactcctcaaccctcaccttttgtgtgtgttcctccaagtggtcctttcccaactggggtttctccattttatccatttttggccccgaatgcggccgcaagatcaggtgaaaatcatgaagcttttggttttgggacgcctatatctcctgttcctttaaattcattcagaactccaactgcgaatggagacaccgggccaaggaggcccggcagacctcgcgctacgaatggcttagttgcagaagatgatggtgtcagtgattcacagaatcagagcgaccaattcggcagtggctatagcgtgcacgttaatgatgtagaagacacaagtacagggaaaaaaaggggaagaccgagaaagactaggatgagtcatccagctaattcccatgtcgaagtggatgtcgatccaatactaaatcagctgcttgcatcctttaaacttgtcgagttcgatcaagctaagaaagctgatggcgacaaggagctagttgggcgaatactattggcatttgatgtgtttcgtagaaggttgacccagattgatgagaaaaggggtgagactccaggttctgcaagaaggccggacctaaaggctgctaatttactgatgacaaagggagctcggacaaatcagacaaagagggttggaaatgtacctgggattgaagttggtgacatattcttcttcaggatggaattgtgtctagttggtttgcatgcacctagtatggctgggatagattatatgagtgtcagacttacaggggatgaagagcctattgctgttagcatagtggcctctggaggatatgatgatgaaggggatgatggggatgtgctaatttatactggccagggtggagtccagagaagggatggccaaatgtttgatcagaaacttgagaggggtaatcttgctttggaaaagagtatgcatcgcggcaatgaggtgagagtaattaggggtgttatagatgttacaaatccgagggggaagatttatatgtatgatggcctttacaggatccaggaatcatgggcagagaaaagcaaattgggtgactgcagcattttcaggtacaaattgcttagagtacctgggcagcctgaagcatttacattgtggaaatcaattcaacaatggagggatggaacagcgacacgtgttggagttatcctacctgacctaacatctggcgcagagagtcaacctgtttgtcttgtaaatgatgttgatgatgagaagggacctgcttatttcacatatatccctagtctgaagtactcaaaaccttatatgaagcctaatccgtctatgggttgtcaatgtgttggcggatgccaacctggagggtccgcttgcccttgcattcagaaaaacggaggctttttgccctttagttcacttggagttcttgtgagttacaaaaccttgatacatgagtgtggttctgcctgttcatgccctccgaattgccgaaatcgaatgtctcaaacaggtcctaaagcgcgtgtggaggtcttcaaaacaaaaaatagaggttggggacttaggtcttgggatcccatacgtggaggtggctttatgtgtgaatatgccggagaagtcgttgaagagtctagggtaggtgagcttggcaatgacggtgacgatgattatatatttgatgctacccgcatgtatgagccattggaacctgtgcgtgattataacgacgaatcgaaaaaagtcccgtatccccttgtaataagtgcaaaaaagggtggcaatgttgctcgttttatgaaccatagttgttcacctaacgtattctggcagcttgttgtacgtgaaaataacaatgagacatactaccacattgccttttttgccattaggcatattcctcccatgcaagaattgacttttgattatggcatggttccgccagacaaagcagacttgtag

SEQ ID NO: 271 - DNA, 2130 bp, synthetic construct
  misc_feature 1..2130: note = Description of sequence: Mutant, Named: NtHAP1b mutant
  source 1..2130: mol_type = other DNA
atggagcaaggctttggttcagactctgttccaccagcagggtccattgacaagtctaaggttttagatgtgaagcctatgagatgtcttatgcctgtttttccatccccaaatggaatgtcgtctgtttcaactcctcaaccctcaccttttgtgtgtgttcctccaagtggtcctttcccaactggggtttctccattttatccatttttggccccgaatgcggccgcaagatcaggtgaaaatcatgaagcttttggttttgggacgcctatatctcctgttcctttaaattcattcagaactccaactgcgaatggagacaccgggccaaggaggcccggcagacctcgcgctacgaatggcttagttgcagaagatgatggtgtcagtgattcacagaatcagagcgaccaattcggcagtggctatagcgtgcacgttaatgatgtagaagacacaagtacagggaaaaaaaggggaagaccgagaaagactaggatgagtcatccagctaattcccatgtcgaagtggatgtcgatccaatactaaatcagctgcttgcatcctttaaacttgtcgagttcgatcaagctaagaaagctgatggcgacaaggagctagttgggcgaatactattggcatttgatgtgtttcgtagaaggttgacccagattgatgagaaaaggggtgagactccaggttctgcaagaaggccggacctaaaggctgctaatttactgatgacaaagggagctcggacaaatcagacaaagagggttggaaatgtacctgggattgaagttggtgacatattcttcttcaggatggaattgtgtctagttggtttgcatgcacctagtatggctgggatagattatatgagtgtcagacttacaggggatgaagagcctattgctgttagcatagtggcctctggaggatatgatgatgaaggggatgatggggatgtgctaatttatactggccagggtggagtccagagaagggatggccaaatgtttgatcagaaacttgagaggggtaatcttgctttggaaaagagtatgcatcgcggcaatgaggtgagagtaattaggggtgttatagatgttacaaatccgagggggaagatttatatgtatgatggcctttacaggatccaggaatcatgggcagagaaaagcaaattgggtgactgcagcattttcaggtacaaattgcttagagtacctgggcagcctgaagcatttacattgtggaaatcaattcaacaatggagggatggaacagcgacacgtgttggagttatcctacctgacctaacatctggcgcagagagtcaacctgtttgtcttgtaaatgatgttgatgatgagaagggacctgcttatttcacatatatccctagtctgaagtactcaaaaccttatatgaagcctaatccgtctatgggttgtcaatgtgttggcggatgccaacctggagggtccgcttgcccttgcattcagaaaaacggaggctttttgccctttagttcacttggagttcttgtgagttacaaaaccttgatacatgagtgtggttctgcctgttcatgccctccgaattgccgaaatcgaatgtctcaaacaggtcctaaagcgcgtgtggaggtcttcaaaacaaaaaatagaggttggggacttaggtcttgggatcccatacgtggaggtggctttatgtgtgaatatgccggagaagtcgttgaagagtctagggtaggtgagcttggcaatgacggtgacgatgattatatatttgatgctacccgcatgtatgagccattggaacctgtgcgtgattataacgacgaatcgaaaaaagtcccgtatccccttgtaataagtgcaaaaaagggtggcaatgttgctcgttttatgaaccatagttgttcacctaacgtattctggcagcttgttgtacgtgaaaataacaatgagacatactaccacattgccttttttgccattaggcatattcctcccatgcaagaattgacttttgattatggcatggttccgccagaggttacttttactagttgtcatggtctgatgaaagaaatggagttcactggtcaccactga

SEQ ID NO: 272 - DNA, 2085 bp, synthetic construct
  misc_feature 1..2085: note = Description of sequence: Mutant, Named: NtHAP1b mutant
  source 1..2085: mol_type = other DNA
atggagcaaggctttggttcagactctgttccaccagcagggtccattgacaagtctaaggttttagatgtgaagcctatgagatgtcttatgcctgtttttccatccccaaatggaatgtcgtctgtttcaactcctcaaccctcaccttttgtgtgtgttcctccaagtggtcctttcccaactggggtttctccattttatccatttttggccccgaatgcggccgcaagatcaggtgaaaatcatgaagcttttggttttgggacgcctatatctcctgttcctttaaattcattcagaactccaactgcgaatggagacaccgggccaaggaggcccggcagacctcgcgctacgaatggcttagttgcagaagatgatggtgtcagtgattcacagaatcagagcgaccaattcggcagtggctatagcgtgcacgttaatgatgtagaagacacaagtacagggaaaaaaaggggaagaccgagaaagactaggatgagtcatccagctaattcccatgtcgaagtggatgtcgatccaatactaaatcagctgcttgcatcctttaaacttgtcgagttcgatcaagctaagaaagctgatggcgacaaggagctagttgggcgaatactattggcatttgatgtgtttcgtagaaggttgacccagattgatgagaaaaggggtgagactccaggttctgcaagaaggccggacctaaaggctgctaatttactgatgacaaagggagctcggacaaatcagacaaagagggttggaaatgtacctgggattgaagttggtgacatattcttcttcaggatggaattgtgtctagttggtttgcatgcacctagtatggctgggatagattatatgagtgtcagacttacaggggatgaagagcctattgctgttagcatagtggcctctggaggatatgatgatgaaggggatgatggggatgtgctaatttatactggccagggtggagtccagagaagggatggccaaatgtttgatcagaaacttgagaggggtaatcttgctttggaaaagagtatgcatcgcggcaatgaggtgagagtaattaggggtgttatagatgttacaaatccgagggggaagatttatatgtatgatggcctttacaggatccaggaatcatgggcagagaaaagcaaattgggtgactgcagcattttcaggtacaaattgcttagagtacctgggcagcctgaagcatttacattgtggaaatcaattcaacaatggagggatggaacagcgacacgtgttggagttatcctacctgacctaacatctggcgcagagagtcaacctgtttgtcttgtaaatgatgttgatgatgagaagggacctgcttatttcacatatatccctagtctgaagtactcaaaaccttatatgaagcctaatccgtctatgggttgtcaatgtgttggcggatgccaacctggagggtccgcttgcccttgcattcagaaaaacggaggctttttgccctttagttcacttggagttcttgtgagttacaaaaccttgatacatgagtgtggttctgcctgttcatgccctccgaattgccgaaatcgaatgtctcaaacaggtcctaaagcgcgtgtggaggtcttcaaaacaaaaaatagaggttggggacttaggtcttgggatcccatacgtggaggtggctttatgtgtgaatatgccggagaagtcgttgaagagtctagggtaggtgagcttggcaatgacggtgacgatgattatatatttgatgctacccgcatgtatgagccattggaacctgtgcgtgattataacgacgaatcgaaaaaagtcccgtatccccttgtaataagtgcaaaaaagggtggcaatgttgctcgttttatgaaccatagttgttcacctaacgtattctggcagcttgttgtacgtgaaaataacaatgagacatactaccacattgccttttttgccattaggcatattcctcccatgcaagaattgacttttgattatggcatggttccgccagacaaagcagacatgtag

SEQ ID NO: 273 - DNA, 2106 bp, synthetic construct
  misc_feature 1..2106: note = Description of sequence: Mutant, Named: NtHAP1b mutant
  source 1..2106: mol_type = other DNA
atggagcaaggctttggttcagactctgttccaccagcagggtccattgacaagtctaaggttttagatgtgaagcctatgagatgtcttatgcctgtttttccatccccaaatggaatgtcgtctgtttcaactcctcaaccctcaccttttgtgtgtgttcctccaagtggtcctttcccaactggggtttctccattttatccatttttggccccgaatgcggccgcaagatcaggtgaaaatcatgaagcttttggttttgggacgcctatatctcctgttcctttaaattcattcagaactccaactgcgaatggagacaccgggccaaggaggcccggcagacctcgcgctacgaatggcttagttgcagaagatgatggtgtcagtgattcacagaatcagagcgaccaattcggcagtggctatagcgtgcacgttaatgatgtagaagacacaagtacagggaaaaaaaggggaagaccgagaaagactaggatgagtcatccagctaattcccatgtcgaagtggatgtcgatccaatactaaatcagctgcttgcatcctttaaacttgtcgagttcgatcaagctaagaaagctgatggcgacaaggagctagttgggcgaatactattggcatttgatgtgtttcgtagaaggttgacccagattgatgagaaaaggggtgagactccaggttctgcaagaaggccggacctaaaggctgctaatttactgatgacaaagggagctcggacaaatcagacaaagagggttggaaatgtacctgggattgaagttggtgacatattcttcttcaggatggaattgtgtctagttggtttgcatgcacctagtatggctgggatagattatatgagtgtcagacttacaggggatgaagagcctattgctgttagcatagtggcctctggaggatatgatgatgaaggggatgatggggatgtgctaatttatactggccagggtggagtccagagaagggatggccaaatgtttgatcagaaacttgagaggggtaatcttgctttggaaaagagtatgcatcgcggcaatgaggtgagagtaattaggggtgttatagatgttacaaatccgagggggaagatttatatgtatgatggcctttacaggatccaggaatcatgggcagagaaaagcaaattgggtgactgcagcattttcaggtacaaattgcttagagtacctgggcagcctgaagcatttacattgtggaaatcaattcaacaatggagggatggaacagcgacacgtgttggagttatcctacctgacctaacatctggcgcagagagtcaacctgtttgtcttgtaaatgatgttgatgatgagaagggacctgcttatttcacatatatccctagtctgaagtactcaaaaccttatatgaagcctaatccgtctatgggttgtcaatgtgttggcggatgccaacctggagggtccgcttgcccttgcattcagaaaaacggaggctttttgccctttagttcacttggagttcttgtgagttacaaaaccttgatacatgagtgtggttctgcctgttcatgccctccgaattgccgaaatcgaatgtctcaaacaggtcctaaagcgcgtgtggaggtcttcaaaacaaaaaatagaggttggggacttaggtcttgggatcccatacgtggaggtggctttatgtgtgaatatgccggagaagtcgttgaagagtctagggtaggtgagcttggcaatgacggtgacgatgattatatatttgatgctacccgcatgtatgagccattggaacctgtgcgtgattataacgacgaatcgaaaaaagtcccgtatccccttgtaataagtgcaaaaaagggtggcaatgttgctcgttttatgaaccatagttgttcacctaacgtattctggcagcttgttgtacgtgaaaataacaatgagacatactaccacattgccttttttgccattaggcatattcctcccatgcaagaattgacttttgattatggcatggttccgccagacaatgtaggaggaagaagtgcttgtgtgggtcattga

SEQ ID NO: 274 - DNA, 2112 bp, synthetic construct
  misc_feature 1..2112: note = Description of sequence: Mutant, Named: NtHAP1b mutant
  source 1..2112: mol_type = other DNA
atggagcaaggctttggttcagactctgttccaccagcagggtccattgacaagtctaaggttttagatgtgaagcctatgagatgtcttatgcctgtttttccatccccaaatggaatgtcgtctgtttcaactcctcaaccctcaccttttgtgtgtgttcctccaagtggtcctttcccaactggggtttctccattttatccatttttggccccgaatgcggccgcaagatcaggtgaaaatcatgaagcttttggttttgggacgcctatatctcctgttcctttaaattcattcagaactccaactgcgaatggagacaccgggccaaggaggcccggcagacctcgcgctacgaatggcttagttgcagaagatgatggtgtcagtgattcacagaatcagagcgaccaattcggcagtggctatagcgtgcacgttaatgatgtagaagacacaagtacagggaaaaaaaggggaagaccgagaaagactaggatgagtcatccagctaattcccatgtcgaagtggatgtcgatccaatactaaatcagctgcttgcatcctttaaacttgtcgagttcgatcaagctaagaaagctgatggcgacaaggagctagttgggcgaatactattggcatttgatgtgtttcgtagaaggttgacccagattgatgagaaaaggggtgagactccaggttctgcaagaaggccggacctaaaggctgctaatttactgatgacaaagggagctcggacaaatcagacaaagagggttggaaatgtacctgggattgaagttggtgacatattcttcttcaggatggaattgtgtctagttggtttgcatgcacctagtatggctgggatagattatatgagtgtcagacttacaggggatgaagagcctattgctgttagcatagtggcctctggaggatatgatgatgaaggggatgatggggatgtgctaatttatactggccagggtggagtccagagaagggatggccaaatgtttgatcagaaacttgagaggggtaatcttgctttggaaaagagtatgcatcgcggcaatgaggtgagagtaattaggggtgttatagatgttacaaatccgagggggaagatttatatgtatgatggcctttacaggatccaggaatcatgggcagagaaaagcaaattgggtgactgcagcattttcaggtacaaattgcttagagtacctgggcagcctgaagcatttacattgtggaaatcaattcaacaatggagggatggaacagcgacacgtgttggagttatcctacctgacctaacatctggcgcagagagtcaacctgtttgtcttgtaaatgatgttgatgatgagaagggacctgcttatttcacatatatccctagtctgaagtactcaaaaccttatatgaagcctaatccgtctatgggttgtcaatgtgttggcggatgccaacctggagggtccgcttgcccttgcattcagaaaaacggaggctttttgccctttagttcacttggagttcttgtgagttacaaaaccttgatacatgagtgtggttctgcctgttcatgccctccgaattgccgaaatcgaatgtctcaaacaggtcctaaagcgcgtgtggaggtcttcaaaacaaaaaatagaggttggggacttaggtcttgggatcccatacgtggaggtggctttatgtgtgaatatgccggagaagtcgttgaagagtctagggtaggtgagcttggcaatgacggtgacgatgattatatatttgatgctacccgcatgtatgagccattggaacctgtgcgtgattataacgacgaatcgaaaaaagtcccgtatccccttgtaataagtgcaaaaaagggtggcaatgttgctcgttttatgaaccatagttgttcacctaacgtattctggcagcttgttgtacgtgaaaataacaatgagacatactaccacattgccttttttgccattaggcatattcctcccatgcaagaattgacttttgattatggcatggttccgccagacaaagcagatgtaggaggaagaagtgcttgtgtgggtcattga

SEQ ID NO: 275 - DNA, 2109 bp, synthetic construct
  misc_feature 1..2109: note = Description of sequence: Mutant, Named: NtHAP1b mutant
  source 1..2109: mol_type = other DNA
atggagcaaggctttggttcagactctgttccaccagcagggtccattgacaagtctaaggttttagatgtgaagcctatgagatgtcttatgcctgtttttccatccccaaatggaatgtcgtctgtttcaactcctcaaccctcaccttttgtgtgtgttcctccaagtggtcctttcccaactggggtttctccattttatccatttttggccccgaatgcggccgcaagatcaggtgaaaatcatgaagcttttggttttgggacgcctatatctcctgttcctttaaattcattcagaactccaactgcgaatggagacaccgggccaaggaggcccggcagacctcgcgctacgaatggcttagttgcagaagatgatggtgtcagtgattcacagaatcagagcgaccaattcggcagtggctatagcgtgcacgttaatgatgtagaagacacaagtacagggaaaaaaaggggaagaccgagaaagactaggatgagtcatccagctaattcccatgtcgaagtggatgtcgatccaatactaaatcagctgcttgcatcctttaaacttgtcgagttcgatcaagctaagaaagctgatggcgacaaggagctagttgggcgaatactattggcatttgatgtgtttcgtagaaggttgacccagattgatgagaaaaggggtgagactccaggttctgcaagaaggccggacctaaaggctgctaatttactgatgacaaagggagctcggacaaatcagacaaagagggttggaaatgtacctgggattgaagttggtgacatattcttcttcaggatggaattgtgtctagttggtttgcatgcacctagtatggctgggatagattatatgagtgtcagacttacaggggatgaagagcctattgctgttagcatagtggcctctggaggatatgatgatgaaggggatgatggggatgtgctaatttatactggccagggtggagtccagagaagggatggccaaatgtttgatcagaaacttgagaggggtaatcttgctttggaaaagagtatgcatcgcggcaatgaggtgagagtaattaggggtgttatagatgttacaaatccgagggggaagatttatatgtatgatggcctttacaggatccaggaatcatgggcagagaaaagcaaattgggtgactgcagcattttcaggtacaaattgcttagagtacctgggcagcctgaagcatttacattgtggaaatcaattcaacaatggagggatggaacagcgacacgtgttggagttatcctacctgacctaacatctggcgcagagagtcaacctgtttgtcttgtaaatgatgttgatgatgagaagggacctgcttatttcacatatatccctagtctgaagtactcaaaaccttatatgaagcctaatccgtctatgggttgtcaatgtgttggcggatgccaacctggagggtccgcttgcccttgcattcagaaaaacggaggctttttgccctttagttcacttggagttcttgtgagttacaaaaccttgatacatgagtgtggttctgcctgttcatgccctccgaattgccgaaatcgaatgtctcaaacaggtcctaaagcgcgtgtggaggtcttcaaaacaaaaaatagaggttggggacttaggtcttgggatcccatacgtggaggtggctttatgtgtgaatatgccggagaagtcgttgaagagtctagggtaggtgagcttggcaatgacggtgacgatgattatatatttgatgctacccgcatgtatgagccattggaacctgtgcgtgattataacgacgaatcgaaaaaagtcccgtatccccttgtaataagtgcaaaaaagggtggcaatgttgctcgttttatgaaccatagttgttcacctaacgtattctggcagcttgttgtacgtgaaaataacaatgagacatactaccacattgccttttttgccattaggcatattcctcccatgcaagaattgacttttgattatggcatggttccgccagacaaagctgtaggaggaagaagtgcttgtgtgggtcattga

SEQ ID NO: 276 - DNA, 2112 bp, synthetic construct; identical to SEQ ID NO: 274
  misc_feature 1..2112: note = Description of sequence: Mutant, Named: NtHAP1b mutant
  source 1..2112: mol_type = other DNA

SEQ ID NO: 277 - DNA, 2085 bp, synthetic construct; identical to SEQ ID NO: 270
  misc_feature 1..2085: note = Description of sequence: Mutant, Named: NtHAP1b mutant
  source 1..2085: mol_type = other DNA

SEQ ID NO: 278 - DNA, 1920 bp, synthetic construct; identical to SEQ ID NO: 187
  misc_feature 1..1920: note = Description of sequence: Mutant, Named: NtHAP2 mutant
  source 1..1920: mol_type = other DNA

SEQ ID NO: 279 - DNA, 66 bp, synthetic construct
  misc_feature 1..66: note = Description of sequence: Mutant, Named: NtHAP2 mutant
  source 1..66: mol_type = other DNA
atggaacaaggtttgcgttgggtaataatcctccgagcatcgataagactagggttttggatgtga

SEQ ID NO: 280 - DNA, 1920 bp, synthetic construct; identical to SEQ ID NO: 197
  misc_feature 1..1920: note = Description of sequence: Mutant, Named: NtHAP2 mutant
  source 1..1920: mol_type = other DNA

SEQ ID NO: 281 - DNA, 1908 bp, synthetic construct
  misc_feature 1..1908: note = Description of sequence: Mutant, Named: NtHAP2 mutant
  source 1..1908: mol_type = other DNA
atggaacaaggtttgcgttctgagggtaataatcctccgagcatcgataagactagggttttggatgtgaagcctttgagatgtcttgcacctgtttttccatccccaaatggaatgtcttctgtttcaactccacagccatcaccttttgtctgtgttcctcccactggtccgttcccccctggggttgctccattttacccctttgtggctccaaatgagtcgggaaggccaggtgaaagtagtcaacaaactccaagtggggtgccgaatcagggcggcccttttggttttgcgcagcctatatctcccgttcctttaaactcattcagaactccaacaactgcgaatggaaatagtgggaggtccaggagggctgtagacgatgatgattacagtaattcacaggatcagaatgaccaatttgccagtggatttagtgtgcacgtgaataatgttgaagattccggtactggaaaaaaaaggggaagaccgaaaaagcctcggagagctcagcaggctgaggggtcaacccctttggaagtggatgttgaacctttgttgactcagttgctcacgtcttttaaacttgttgacttcgatcaggtcaagaaagctgatggtgacaaggagctagtggggagggtactgttggtttttgacttgttcagaagaaggatgacccaaattgacgaatcgagggatgggtcaggttctggtagaagaccagacctaaaagcttctaatatgctgatgacaaagggagttcggacaaaccaaacaaagaggattggaaatgcacccgggattgaagttggtgacatcttcttcttcaggatggaattgtgcctagtgggattgcatgcgccaactatggctgggatagattatatgagtgtcaaactaacaatggacgaagaacctcttgcggtcagcatagtgtcctctggaggatatgatgatgatggaggtgatggcgatgtattaatttacactggccagggtggagtccagaggaaagacgggcaagtgtttgatcagaaacttgagaggggaaaccttgctctggaaaagagtgtgcatcgagccaatgaagtaagagtaattaggggtgttaaggatgtcgcatatccaaccgggaagatttatatttacgacggactttataagattcaggaatcatgggcagagaaaaacaaggtgggctgcaatgtattcaagtacaaacttctgagagtccctgggcagcccgaagcatttaaagtatggaagtcaattcagcaatggaaagatggcgtggcatcacgtgttggagtcatcctaccggacctgacgtctggtgcagaaagtcaaccagtttgtcttgttaatgatgtagatgacgagaaaggacctgcctatttcacatatattcctagtttgaagtactcaaaaccttttgtaatgcctagaccctctccgagttgtcactgcgttggcgggtgccaacctggtgactccaattgcgcttgtattcagagtaatggtggctttttgccttatagttcacttggagttcttttgagttacaaagccttgatacatgagtgtggttcggcctgttcatgccctcctaattgccgaaatcgaatgtctcaaggaggtcctaaagctcgtttggaggtcttcaagacaaaaaatagaggttggggactcagatcttgggatcctatacgtggaggtggtttcatttgtgaatatgctggagaagtcatagacgctggtaattacagtgacgacaattacatttttgatgcaacccgtatatatgcgccattggaagccgagcgtgattataatgacgagtctcggaaagtcccttttcccctggtagtgccaagaatggtggaaatatttctcgctttatga

SEQ ID NO: 282 - DNA, 24 bp, synthetic construct
  misc_feature 1..24: note = Description of sequence: Mutant, Named: NtHAP2 mutant
  source 1..24: mol_type = other DNA
atggaacaaggtttgcgttcttga

SEQ ID NO: 283 - DNA, 1920 bp, synthetic construct; identical to SEQ ID NO: 187
  misc_feature 1..1920: note = Description of sequence: Mutant, Named: NtHAP2 mutant
  source 1..1920: mol_type = other DNA

SEQ ID NO: 284 - DNA, 1920 bp, synthetic construct; identical to SEQ ID NO: 187
  misc_feature 1..1920: note = Description of sequence: Mutant, Named: NtHAP2 mutant
  source 1..1920: mol_type = other DNA

SEQ ID NO: 285 - DNA, 603 bp, synthetic construct; identical to SEQ ID NO: 73
  misc_feature 1..603: note = Description of sequence: Promoter, Named: NtHAP1b promoter
  source 1..603: mol_type = other DNA

SEQ ID NO: 286 - DNA, 513 bp, synthetic construct; identical to SEQ ID NO: 79
  misc_feature 1..513: note = Description of sequence: Promoter, Named: NtHAP1a promoter
  source 1..513: mol_type = other DNA

SEQ ID NO: 287 - DNA, 517 bp, synthetic construct; identical to SEQ ID NO: 75
  misc_feature 1..517: note = Description of sequence: Promoter, Named: NtHAP1a promoter
  source 1..517: mol_type = other DNA

SEQ ID NO: 288 - DNA, 603 bp, synthetic construct; identical to SEQ ID NO: 74
  misc_feature 1..603: note = Description of sequence: Promoter, Named: NtHAP1b promoter
  source 1..603: mol_type = other DNA

SEQ ID NO: 289 - DNA, 600 bp, synthetic construct
  misc_feature 1..600: note = Description of sequence: Promoter, Named: NtHAP1b promoter
  source 1..600: mol_type = other DNA
cgcaatttttcttctaaagctctctgtgtgcttcaaagatcgttttcccaaatttgcccaggtacttatccatttcaagatcgtttcttttttgactgaaaatgtttgaatttctgatccatttgagacttattttgcttctggcaatttttctttaatttttttgtaaattatttttctttttattgtcattttactatgaagggttcctattacaaaatcttgagttgggtttagcttattttgtccttttgcatgttgttttttccttaattttggtggaattttttgctgggtttctagggttaactccattttagggcttgctcctgttcatttcccttaagttgtgagtttttttggattttcagtcaacatagccattcttgagcaatacatttgcatctttagccttttattggtgcatgatgtcctagaattgtatttttaatgggtttcttactttttttccttgctgtagtaattggagattgtgcatggcaaggtggtaactggaaaaagtgcagagctttgtatttgggttattaatgtgagtgaaagctgtggtctttgttgttgtggctattgattttgattgaa

SEQ ID NO: 290 - DNA, 513 bp, synthetic construct; identical to SEQ ID NO: 79
  misc_feature 1..513: note = Description of sequence: Promoter, Named: NtHAP1a promoter
  source 1..513: mol_type = other DNA

SEQ ID NO: 291 - DNA, 368 bp, synthetic construct
  misc_feature 1..368: note = Description of sequence: Promoter, Named: NtHAP1a promoter
  source 1..368: mol_type = other DNA
gtttgactgaaaatgcttgaatttctgatccatttgagacttattttgtttctgataatttttcattattttttttgtaaattatttttctttttattgtcattatactatgaagggttcctattacaaaatcttgagttgggtttagcttattttgtccttttgcatgttgttttttctaaattttggtggaatttttgctgggtttctagggttagctccatttagggcttgttcctgttcatttcccttaaattgtgagtttttatttggattttcagtcaacgtagccattcttgagcagaaagtttgcttaatgtgagtgaaagctgtgatctttgttgttgtggctattgatttcgattgaa

SEQ ID NO: 292 - DNA, 593 bp, synthetic construct
  misc_feature 1..593: note = Description of sequence: Promoter, Named: NtHAP1b promoter
  source 1..593: mol_type = other DNA
cgcaatttttcttctaaagctctctgtgtgcttcaaagatcgttttcccaaatttgcccaggtacttatccatttcaagatcgtttcttttttgactgaaaatgtttgaatttctgatccatttgagacttattttgcttctggcaatttttctttaatttttttgtaaattatttttctttttattgtcattttactatgaagggttcctattacaaaatcttgagttgggtttagcttattttgtccttttgcatgttgttttttccttaattttggtggaattttttgctgggtttctagggttaactccattttagggcttgctcctgttcatttcccttaagttgtgagtttttttggattttcagtcaacatagccattcttgagcaatacatttgcatctttagccttttattggtgcatgatgtcctagaattgtatttttaatgggtttcttactttttttccttgctgtagtaattggagatttctaggtggtaactggaaaaagtgcagagctttgtatttgggttattaatgtgagtgaaagctgtggtctttgttgttgtggctattgattttgattgaa

SEQ ID NO: 293 - DNA, 603 bp, synthetic construct; identical to SEQ ID NO: 73
  misc_feature 1..603: note = Description of sequence: Promoter, Named: NtHAP1b promoter
  source 1..603: mol_type = other DNA

SEQ ID NO: 294 - DNA, 506 bp, synthetic construct
  misc_feature 1..506: note = Description of sequence: Promoter, Named: NtHAP1a promoter
  source 1..506: mol_type = other DNA
gtttgactgaaaatgcttgaatttctgatccatttgagacttattttgtttctgataatttttcattattttttttgtaaattatttttctttttattgtcattatactatgaagggttcctattacaaaatcttgagttgggtttagcttattttgtccttttgcatgttgttttttctaaattttggtggaatttttgctgggtttctagggttagctccatttagggcttgttcctgttcatttcccttaaattgtgagtttttatttggattttcagtcaacgtagccattcttgagcagaaagtttgcatctttagcctttttattggtgcatgatgtcctagaattgtattttttttaatggttttcttacttttttttcttgctgtagtaattggagattgtgcatggtaacaggaaaaagtgcagagctttgtatttgggttattaatgtgagtgaaagctgtgatctttgttgttgtggctattgatttcgattgaa

SEQ ID NO: 295 - DNA, 515 bp, synthetic construct
  misc_feature 1..515: note = Description of sequence: Promoter, Named: NtHAP1a promoter
  source 1..515: mol_type = other DNA
gtttgactgaaaatgcttgaatttctgatccatttgagacttattttgtttctgataatttttcattattttttttgtaaattatttttctttttattgtcattatactatgaagggttcctattacaaaatcttgagttgggtttagcttattttgtccttttgcatgttgttttttctaaattttggtggaatttttgctgggtttctagggttagctccatttagggcttgttcctgttcatttcccttaaattgtgagtttttatttggattttcagtcaacgtagccattcttgagcagaaagtttgcatctttagcctttttattggtgcatgatgtcctagaattgtattttttttaatggttttcttacttttttttcttgctgtagtaattggagattgtgcatggtctaggtggtaacaggaaaaagtgcagagctttgtatttgggttattaatgtgagtgaaagctgtgatctttgttgttgtggctattgatttcgattgaa

SEQ ID NO: 296 - DNA, 603 bp, synthetic construct; identical to SEQ ID NO: 74
  misc_feature 1..603: note = Description of sequence: Promoter, Named: NtHAP1b promoter
  source 1..603: mol_type = other DNA

SEQ ID NO: 297 - DNA, 509 bp, synthetic construct
  misc_feature 1..509: note = Description of sequence: Promoter, Named: NtHAP1a promoter
  source 1..509: mol_type = other DNA
gtttgactgaaaatgcttgaatttctgatccatttgagacttattttgtttctgataatttttcattattttttttgtaaattatttttctttttattgtcattatactatgaagggttcctattacaaaatcttgagttgggtttagcttattttgtccttttgcatgttgttttttctaaattttggtggaatttttgctgggtttctagggttagctccatttagggcttgttcctgttcatttcccttaaattgtgagtttttatttggattttcagtcaacgtagccattcttgagcagaaagtttgcatctttagcctttttattggtgcatgatgtcctagaattgtattttttttaatggttttcttacttttttttcttgctgtagtaattggagattgttctaggtggtaacaggaaaaagtgcagagctttgtatttgggttattaatgtgagtgaaagctgtgatctttgttgttgtggctattgatttcgattgaa

SEQ ID NO: 298 - DNA, 356 bp, synthetic construct
  misc_feature 1..356: note = Description of sequence: Promoter, Named: NtHAP1a promoter
  source 1..356: mol_type = other DNA
gtttgactgaaaatgcttgaatttctgatccatttgagacttattttgtttctgataatttttcattattttttttgtaaattatttttctttttattgtcattatactatgaagggttcctattacaaaatcttgagttgggtttagcttattttgtccttttgcatgttgttttttctaaattttggtggaatttttgctgggtttctagggttagctccatttagggcttgttcctgttcatttcccttaaattgtgagtttttatttggattttcagtcaacgtagccattcttgagcagaaagtttgcatctttagcctttttgttgttgtggctattgatttcgattgaa

SEQ ID NO: 299 - DNA, 356 bp, synthetic construct; identical to SEQ ID NO: 298
  misc_feature 1..356: note = Description of sequence: Promoter, Named: NtHAP1a promoter
  source 1..356: mol_type = other DNA

SEQ ID NO: 300 - DNA, 603 bp, synthetic construct
  misc_feature 1..603: note = Description of sequence: Promoter, Named: NtHAP1b promoter
  source 1..603: mol_type = other DNA
cgcaatttttcttctaaagctctctgtgtgcttcaaagatcgttttcccaaatttgcccaggtacttatccatttcaagatcgtttcttttttgactgaaaatgtttgaatttctgatccatttgagacttattttgcttctggcaatttttctttaatttttttgtaaattatttttctttttattgtcattttactatgaagggttcctattacaaaatcttgagttgggtttagcttattttgtccttttgcatgttgttttttccttaattttggtggaattttttgctgggtttctagggttaactccattttagggcttgctcctgttcatttcccttaagttgtgagtttttttggattttcagtcaacatagccattcttgagcaatacatttgcatctttagccttttattggtgcatgatgtcctagaattgtatttttaatgggtttcttactttttttccttgctgtagtaattggagattgtgcatggactctaggtggtaactggaaaaagtgcagagctttgtatttgggttattaatgtgagtgaaagctgtggtctttgttgttgtggctattgattttgattgaa

SEQ ID NO: 301 - DNA, 356 bp, synthetic construct; identical to SEQ ID NO: 298
  misc_feature 1..356: note = Description of sequence: Promoter, Named: NtHAP1a promoter
  source 1..356: mol_type = other DNA

SEQ ID NO: 302 - DNA, 603 bp, synthetic construct; identical to SEQ ID NO: 74
  misc_feature 1..603: note = Description of sequence: Promoter, Named: NtHAP1b promoter
  source 1..603: mol_type = other DNA

SEQ ID NO: 303 - DNA, 517 bp, synthetic construct; identical to SEQ ID NO: 72
  misc_feature 1..517: note = Description of sequence: Promoter, Named: NtHAP1a promoter
  source 1..517: mol_type = other DNA

SEQ ID NO: 304 - DNA, 515 bp, synthetic construct
  misc_feature 1..515: note = Description of sequence: Promoter, Named: NtHAP1a promoter
  source 1..515: mol_type = other DNA
gtttgactgaaaatgcttgaatttctgatccatttgagacttattttgtttctgataatttttcattattttttttgtaaattatttttctttttattgtcattatactatgaagggttcctattacaaaatcttgagttgggtttagcttattttgtccttttgcatgttgttttttctaaattttggtggaatttttgctgggtttctagggttagctccatttagggcttgttcctgttcatttcccttaaattgtgagtttttatttggattttcagtcaacgtagccattcttgagcagaaagtttgcatctttagcctttttattggtgcatgatgtcctagaattgtattttttttaatggttttcttacttttttttcttgctgtagtaattggagattgtgcatggactaggtggtaacaggaaaaagtgcagagctttgtatttgggttattaatgtgagtgaaagctgtgatctttgttgttgtggctattgatttcgattgaa

SEQ ID NO: 305 - DNA, 585 bp, synthetic construct
  misc_feature 1..585: note = Description of sequence: Promoter, Named: NtHAP1b promoter
  source 1..585: mol_type = other DNA
cgcaatttttcttctaaagctctctgtgtgcttcaaagatcgttttcccaaatttgcccaggtacttatccatttcaagatcgtttcttttttgactgaaaatgtttgaatttctgatccatttgagacttattttgcttctggcaatttttctttaatttttttgtaaattatttttctttttattgtcattttactatgaagggttcctattacaaaatcttgagttgggtttagcttattttgtccttttgcatgttgttttttccttaattttggtggaattttttgctgggtttctagggttaactccattttagggcttgctcctgttcatttcccttaagttgtgagtttttttggattttcagtcaacatagccattcttgagcaatacatttgcatctttagccttttattggtgcatgatgtcctagaattgtatttttaatgggtttcttactttttttccttgctgtagtaattggagattgtgcatggaaaaagtgcagagctttgtatttgggttattaatgtgagtgaaagctgtggtctttgttgttgtggctattgattttgattgaa

SEQ ID NO: 306 - DNA, 603 bp, synthetic construct; identical to SEQ ID NO: 74
  misc_feature 1..603: note = Description of sequence: Promoter, Named: NtHAP1b promoter
  source 1..603: mol_type = other DNA

SEQ ID NO: 307 - DNA, 356 bp, synthetic construct; identical to SEQ ID NO: 298
  misc_feature 1..356: note = Description of sequence: Promoter, Named: NtHAP1a promoter
  source 1..356: mol_type = other DNA

SEQ ID NO: 308 - DNA, 356 bp, synthetic construct; identical to SEQ ID NO: 298
  misc_feature 1..356: note = Description of sequence: Promoter, Named: NtHAP1a promoter
  source 1..356: mol_type = other DNA

SEQ ID NO: 309 - DNA, 511 bp, synthetic construct
  misc_feature 1..511: note = Description of sequence: Promoter, Named: NtHAP1a promoter
  source 1..511: mol_type = other DNA
gtttgactgaaaatgcttgaatttctgatccatttgagacttattttgtttctgataatttttcattattttttttgtaaattatttttctttttattgtcattatactatgaagggttcctattacaaaatcttgagttgggtttagcttattttgtccttttgcatgttgttttttctaaattttggtggaatttttgctgggtttctagggttagctccatttagggcttgttcctgttcatttcccttaaattgtgagtttttatttggattttcagtcaacgtagccattcttgagcagaaagtttgcatctttagcctttttattggtgcatgatgtcctagaattgtattttttttaatggttttcttacttttttttcttgctgtagtaattggagattgtgctctaggtggtaacaggaaaaagtgcagagctttgtatttgggttattaatgtgagtgaaagctgtgatctttgttgttgtggctattgatttcgattgaa

SEQ ID NO: 310 - DNA, 517 bp, synthetic construct; identical to SEQ ID NO: 72
  misc_feature 1..517: note = Description of sequence: Promoter, Named: NtHAP1a promoter
  source 1..517: mol_type = other DNA

SEQ ID NO: 311 - DNA, 603 bp, synthetic construct; identical to SEQ ID NO: 74
  misc_feature 1..603: note = Description of sequence: Promoter, Named: NtHAP1b promoter
  source 1..603: mol_type = other DNA

SEQ ID NO: 312 - DNA, 603 bp, synthetic construct; identical to SEQ ID NO: 300
  misc_feature 1..603: note = Description of sequence: Promoter, Named: NtHAP1b promoter
  source 1..603: mol_type = other DNA

SEQ ID NO: 313 - DNA, 517 bp, synthetic construct; identical to SEQ ID NO: 72
  misc_feature 1..517: note = Description of sequence: Promoter, Named: NtHAP1a promoter
  source 1..517: mol_type = other DNA

SEQ ID NO: 314 - DNA, 598 bp, synthetic construct
  misc_feature 1..598: note = Description of sequence: Promoter, Named: NtHAP1b promoter
  source 1..598: mol_type = other DNA
cgcaatttttcttctaaagctctctgtgtgcttcaaagatcgttttcccaaatttgcccaggtacttatccatttcaagatcgtttcttttttgactgaaaatgtttgaatttctgatccatttgagacttattttgcttctggcaatttttctttaatttttttgtaaattatttttctttttattgtcattttactatgaagggttcctattacaaaatcttgagttgggtttagcttattttgtccttttgcatgttgttttttccttaattttggtggaattttttgctgggtttctagggttaactccattttagggcttgctcctgttcatttcccttaagttgtgagtttttttggattttcagtcaacatagccattcttgagcaatacatttgcatctttagccttttattggtgcatgatgtcctagaattgtatttttaatgggtttcttactttttttccttgctgtagtaattggagattgtgcatctaggtggtaactggaaaaagtgcagagctttgtatttgggttattaatgtgagtgaaagctgtggtctttgttgttgtggctattgattttgattgaa

SEQ ID NO: 315 - DNA, 603 bp, synthetic construct; identical to SEQ ID NO: 74
  misc_feature 1..603: note = Description of sequence: Promoter, Named: NtHAP1b promoter
  source 1..603: mol_type = other DNA

SEQ ID NO: 316 - DNA, 517 bp, synthetic construct; identical to SEQ ID NO: 75
  misc_feature 1..517: note = Description of sequence: Promoter, Named: NtHAP1a promoter
  source 1..517: mol_type = other DNA

SEQ ID NO: 317 - DNA, 408 bp, synthetic construct
  misc_feature 1..408: note = Description of sequence: Promoter, Named: NtHAP1a promoter
  source 1..408: mol_type = other DNA
gtttgactgaaaatgcttgaatttctgatccatttgagacttattttgtttctgataatttttcattattttttttgtaaattatttttctttttattgtcattatactatgaagggttcctattacaaaatcttgagttgggtttagcttattttgtccttttgcatgttgttttttctaaattttggtggaatttttgctgggtttctagggttagctccatttagggcttgttcctgttcatttcccttaaattgtgagtttttatttggattttcagtcaacgtagccattcttgagcagaaagtttgcatctttagcctttttattggtgcatgatgtcctagaattgtattcttgagtgaaagctgtgatctttgttgttgtggctattgatttcgattgaa

SEQ ID NO: 318 - DNA, 517 bp, synthetic construct; identical to SEQ ID NO: 72
  misc_feature 1..517: note = Description of sequence: Promoter, Named: NtHAP1a promoter
  source 1..517: mol_type = other DNA

SEQ ID NO: 319 - DNA, 601 bp, synthetic construct
  misc_feature 1..601: note = Description of sequence: Promoter, Named: NtHAP1b promoter
  source 1..601: mol_type = other DNA
cgcaatttttcttctaaagctctctgtgtgcttcaaagatcgttttcccaaatttgcccaggtacttatccatttcaagatcgtttcttttttgactgaaaatgtttgaatttctgatccatttgagacttattttgcttctggcaatttttctttaatttttttgtaaattatttttctttttattgtcattttactatgaagggttcctattacaaaatcttgagttgggtttagcttattttgtccttttgcatgttgttttttccttaattttggtggaattttttgctgggtttctagggttaactccattttagggcttgctcctgttcatttcccttaagttgtgagtttttttggattttcagtcaacatagccattcttgagcaatacatttgcatctttagccttttattggtgcatgatgtcctagaattgtatttttaatgggtttcttactttttttccttgctgtagtaattggagattgtgcatgttctaggtggtaactggaaaaagtgcagagctttgtatttgggttattaatgtgagtgaaagctgtggtctttgttgttgtggctattgattttgattgaa

SEQ ID NO: 320 - DNA, 603 bp, synthetic construct; identical to SEQ ID NO: 74
  misc_feature 1..603: note = Description of sequence: Promoter, Named: NtHAP1b promoter
  source 1..603: mol_type = other DNA

SEQ ID NO: 321 - DNA, 242 bp, synthetic construct
  misc_feature 1..242: note = Description of sequence: Promoter, Named: NtHAP2 promoter
  source 1..242: mol_type = other DNA
tgacttttaaatattttgaattgttaatcattgtgacttgtagtactttttaaatttatagattctatgttcgaatttgctgtcaaaattaagaattttgactctcggaatccgaaatgtatcattctttttgaaatgaagggagtattattttatgcctactttctctgaattattacttgctttgtgttggtaggtcaatgattgaaaaggggatttgaagttgtaaatgtgagttaaag

SEQ ID NO: 322 - DNA, 242 bp, synthetic construct; identical to SEQ ID NO: 321
  misc_feature 1..242: note = Description of sequence: Promoter, Named: NtHAP2 promoter
  source 1..242: mol_type = other DNA

SEQ ID NO: 323 - DNA, 603 bp, synthetic construct; identical to SEQ ID NO: 74
  misc_feature 1..603: note = Description of sequence: Promoter, Named: NtHAP1b promoter
  source 1..603: mol_type = other DNA

SEQ ID NO: 324 - DNA, 603 bp, synthetic construct
  misc_feature 1..603: note = Description of sequence: Promoter, Named: NtHAP1b promoter
  source 1..603: mol_type = other DNA
cgcaatttttcttctaaagctctctgtgtgcttcaaagatcgttttcccaaatttgcccaggtacttatccatttcaagatcgtttcttttttgactgaaaatgtttgaatttctgatccatttgagacttattttgcttctggcaatttttctttaatttttttgtaaattatttttctttttattgtcattttactatgaagggttcctattacaaaatcttgagttgggtttagcttattttgtccttttgcatgttgttttttccttaattttggtggaattttttgctgggtttctagggttaactccattttagggcttgctcctgttcatttcccttaagttgtgagtttttttggattttcagtcaacatagccattcttgagcaatacatttgcatctttagccttttattggtgcatgatgtcctagaattgtatttttaatgggtttcttactttttttccttgctgtagtaattggagattgtgcatggagtctaggtggtaactggaaaaagtgcagagctttgtatttgggttattaatgtgagtgaaagctgtggtctttgttgttgtggctattgattttgattgaa

SEQ ID NO: 325 - DNA, 598 bp, synthetic construct; identical to SEQ ID NO: 314
  misc_feature 1..598: note = Description of sequence: Promoter, Named: NtHAP1b promoter
  source 1..598: mol_type = other DNA

SEQ ID NO: 326 - DNA, 466 bp, synthetic construct
  misc_feature 1..466: note = Description of sequence: Promoter, Named: NtHAP1a promoter
  source 1..466: mol_type = other DNA
gtttgactgaaaatgcttgaatttctgatccatttgagacttattttgtttctgataatttttcattattttttttgtaaattatttttctttttattgtcattatactatgaagggttcctattacaaaatcttgagttgggtttagcttattttgtccttttgcatgttgttttttctaaattttggtggaatttttgctgggtttctagggttagctccatttagggcttgttcctgttcatttcccttaaattgtgagtttttatttggattttcagtcaacgtagccattcttgagcagaaagtttgcatctttagcctttttattggtgcatgatgtcctagaattgtattttttttaattctaggtggtaacaggaaaaagtgcagagctttgtatttgggttattaatgtgagtgaaagctgtgatctttgttgttgtggctattgatttcgattgaa

SEQ ID NO: 327 - DNA, 517 bp, synthetic construct; identical to SEQ ID NO: 72
  misc_feature 1..517: note = Description of sequence: Promoter, Named: NtHAP1a promoter
  source 1..517: mol_type = other DNA

SEQ ID NO: 328 - DNA, 591 bp, synthetic construct
  misc_feature 1..591: note = Description of sequence: Promoter, Named: NtHAP1b promoter
  source 1..591: mol_type = other DNA
cgcaatttttcttctaaagctctctgtgtgcttcaaagatcgttttcccaaatttgcccaggtacttatccatttcaagatcgtttcttttttgactgaaaatgtttgaatttctgatccatttgagacttattttgcttctggcaatttttctttaatttttttgtaaattatttttctttttattgtcattttactatgaagggttcctattacaaaatcttgagttgggtttagcttattttgtccttttgcatgttgttttttccttaattttggtggaattttttgctgggtttctagggttaactccattttagggcttgctcctgttcatttcccttaagttgtgagtttttttggattttcagtcaacatagccattcttgagcaatacatttgcatctttagccttttattggtgcatgatgtcctagaattgtatttttaatgggtttcttactttttttccttgctgtagtaattggagattgtgcatggaactggaaaaagtgcagagctttgtatttgggttattaatgtgagtgaaagctgtggtctttgttgttgtggctattgattttgattgaa

SEQ ID NO: 329 - DNA, 517 bp, synthetic construct; identical to SEQ ID NO: 75
  misc_feature 1..517: note = Description of sequence: Promoter, Named: NtHAP1a promoter
  source 1..517: mol_type = other DNA

SEQ ID NO: 330 - DNA, 603 bp, synthetic construct; identical to SEQ ID NO: 73
  misc_feature 1..603: note = Description of sequence: Promoter, Named: NtHAP1b promoter
  source 1..603: mol_type = other DNA

SEQ ID NO: 331 - DNA, 511 bp, synthetic construct; identical to SEQ ID NO: 309
  misc_feature 1..511: note = Description of sequence: Promoter, Named: NtHAP1a promoter
  source 1..511: mol_type = other DNA

SEQ ID NO: 332 - DNA, 603 bp, synthetic construct; identical to SEQ ID NO: 74
  misc_feature 1..603: note = Description of sequence: Promoter, Named: NtHAP1b promoter
  source 1..603: mol_type = other DNA

SEQ ID NO: 333 - DNA, 603 bp, synthetic construct; identical to SEQ ID NO: 73
  misc_feature 1..603: note = Description of sequence: Promoter, Named: NtHAP1b promoter
  source 1..603: mol_type = other DNA

SEQ ID NO: 334 - DNA, 596 bp, synthetic construct
  misc_feature 1..596: note = Description of sequence: Promoter, Named: NtHAP1b promoter
  source 1..596: mol_type = other DNA
cgcaatttttcttctaaagctctctgtgtgcttcaaagatcgttttcccaaatttgcccaggtacttatccatttcaagatcgtttcttttttgactgaaaatgtttgaatttctgatccatttgagacttattttgcttctggcaatttttctttaatttttttgtaaattatttttctttttattgtcattttactatgaagggttcctattacaaaatcttgagttgggtttagcttattttgtccttttgcatgttgttttttccttaattttggtggaattttttgctgggtttctagggttaactccattttagggcttgctcctgttcatttcccttaagttgtgagtttttttggattttcagtcaacatagccattcttgagcaatacatttgcatctttagccttttattggtgcatgatgtcctagaattgtatttttaatgggtttcttactttttttccttgctgtagtaattggagattgtgtctaggtggtaactggaaaaagtgcagagctttgtatttgggttattaatgtgagtgaaagctgtggtctttgttgttgtggctattgattttgattgaa

SEQ ID NO: 335 - DNA, 584 bp, synthetic construct
  misc_feature 1..584: note = Description of sequence: Promoter, Named: NtHAP1b promoter
  source 1..584: mol_type = other DNA
cgcaatttttcttctaaagctctctgtgtgcttcaaagatcgttttcccaaatttgcccaggtacttatccatttcaagatcgtttcttttttgactgaaaatgtttgaatttctgatccatttgagacttattttgcttctggcaatttttctttaatttttttgtaaattatttttctttttattgtcattttactatgaagggttcctattacaaaatcttgagttgggtttagcttattttgtccttttgcatgttgttttttccttaattttggtggaattttttgctgggtttctagggttaactccattttagggcttgctcctgttcatttcccttaagttgtgagtttttttggattttcagtcaacatagccattcttgagcaatacatttgcatctttagccttttattggtgcatgatgtcctagaattgtatttttaatgggtttcttactttttttccttgctgtagtaattggagattgtgcatggaaaagtgcagagctttgtatttgggttattaatgtgagtgaaagctgtggtctttgttgttgtggctattgattttgattgaa

SEQ ID NO: 336 - DNA, 377 bp, synthetic construct
  misc_feature 1..377: note = Description of sequence: Promoter, Named: NtHAP1a promoter
  source 1..377: mol_type = other DNA
gtttgactgaaaatgcttgaatttctgatccatttgagacttattttgtttctgataatttttcattattttttttgtaaattatttttctttttattgtcattatactatgaagggttcctattacaaaatcttgagttgggtttagcttattttgtccttttgcatgttgttttttctaaattttggtggaatttttgctgggtttctagggttagctccatttagggcttgttcctgttcatttcccttaaattgtgagtttttatttggattttcagtcaacgtagccattcttgagcagagctttgtatttgggttattaatgtgagtgaaagctgtgatctttgttgttgtggctattgatttcgattgaa

SEQ ID NO: 337 - DNA, 557 bp, synthetic construct
  misc_feature 1..557: note = Description of sequence: Promoter, Named: NtHAP1b promoter
  source 1..557: mol_type = other DNA
cgcaatttttcttctaaagctctctgtgtgcttcaaagatcgttttcccaaatttgcccaggtacttatccatttcaagatcgtttcttttttgactgaaaatgtttgaatttctgatccatttgagacttattttgcttctggcaatttttctttaatttttttgtaaattatttttctttttattgtcattttactatgaagggttcctattacaaaatcttgagttgggtttagcttattttgtccttttgcatgttgttttttccttaattttggtggaattttttgctgggtttctagggttaactccattttagggcttgctcctgttcatttcccttaagttgtgagtttttttggattttcagtcaacatagccattcttgagcaatacatttgcatctttagccttttattggtgcatgatgtcctagaattgtatttttaatgggtttctaggtggtaactggaaaaagtgcagagctttgtatttgggttattaatgtgagtgaaagctgtggtctttgttgttgtggctattgattttgattgaa

SEQ ID NO: 338 - DNA, 603 bp, synthetic construct; identical to SEQ ID NO: 74
  misc_feature 1..603: note = Description of sequence: Promoter, Named: NtHAP1b promoter
  source 1..603: mol_type = other DNA

SEQ ID NO: 339 - DNA, 517 bp, synthetic construct
  misc_feature 1..517: note = Description of sequence: Promoter, Named: NtHAP1a promoter
  source 1..517: mol_type = other DNA
gtttgactgaaaatgcttgaatttctgatccatttgagacttattttgtttctgataatttttcattattttttttgtaaattatttttctttttattgtcattatactatgaagggttcctattacaaaatcttgagttgggtttagcttattttgtccttttgcatgttgttttttctaaattttggtggaatttttgctgggtttctagggttagctccatttagggcttgttcctgttcatttcccttaaattgtgagtttttatttggattttcagtcaacgtagccattcttgagcagaaagtttgcatctttagcctttttattggtgcatgatgtcctagaattgtattttttttaatggttttcttacttttttttcttgctgtagtaattggagattgtgcatgagatctaggtggtaacaggaaaaagtgcagagctttgtatttgggttattaatgtgagtgaaagctgtgatctttgttgttgtggctattgatttcgattgaa

SEQ ID NO: 340 - DNA, 603 bp, synthetic construct; identical to SEQ ID NO: 300
  misc_feature 1..603: note = Description of sequence: Promoter, Named: NtHAP1b promoter
  source 1..603: mol_type = other DNA

SEQ ID NO: 341 - DNA, 517 bp, synthetic construct; identical to SEQ ID NO: 75
  misc_feature 1..517: note = Description of sequence: Promoter, Named: NtHAP1a promoter
  source 1..517: mol_type = other DNA

SEQ ID NO: 342 - DNA, 603 bp, synthetic construct; identical to SEQ ID NO: 73
  misc_feature 1..603: note = Description of sequence: Promoter, Named: NtHAP1b promoter
  source 1..603: mol_type = other DNA

SEQ ID NO: 343 - DNA, 517 bp, synthetic construct; identical to SEQ ID NO: 72
  misc_feature 1..517: note = Description of sequence: Promoter, Named: NtHAP1a promoter
  source 1..517: mol_type = other DNA

SEQ ID NO: 344 - DNA, 603 bp, synthetic construct; identical to SEQ ID NO: 74
  misc_feature 1..603: note = Description of sequence: Promoter, Named: NtHAP1b promoter
  source 1..603: mol_type = other DNA

SEQ ID NO: 345 - DNA, 408 bp, synthetic construct; identical to SEQ ID NO: 317
  misc_feature 1..408: note = Description of sequence: Promoter, Named: NtHAP1a promoter
  source 1..408: mol_type = other DNA

SEQ ID NO: 346 - DNA, 517 bp, synthetic construct; identical to SEQ ID NO: 72
  misc_feature 1..517: note = Description of sequence: Promoter, Named: NtHAP1a promoter
  source 1..517: mol_type = other DNA

SEQ ID NO: 347 - DNA, 601 bp, synthetic construct; identical to SEQ ID NO: 319
  misc_feature 1..601: note = Description of sequence: Promoter, Named: NtHAP1b promoter
  source 1..601: mol_type = other DNA

SEQ ID NO: 348 - DNA, 603 bp, synthetic construct; identical to SEQ ID NO: 74
  misc_feature 1..603: note = Description of sequence: Promoter, Named: NtHAP1b promoter
  source 1..603: mol_type = other DNA

SEQ ID NO: 349 - DNA, 517 bp, synthetic construct; identical to SEQ ID NO: 72
  misc_feature 1..517: note = Description of sequence: Promoter, Named: NtHAP1a promoter
  source 1..517: mol_type = other DNA

SEQ ID NO: 350 - DNA, 517 bp, synthetic construct; identical to SEQ ID NO: 75
  misc_feature 1..517: note = Description of sequence: Promoter, Named: NtHAP1a promoter
  source 1..517: mol_type = other DNA

SEQ ID NO: 351 - DNA, 603 bp, synthetic construct; identical to SEQ ID NO: 74
  misc_feature 1..603: note = Description of sequence: Promoter, Named: NtHAP1b promoter
  source 1..603: mol_type = other DNA

SEQ ID NO: 352 - DNA, 22 bp, synthetic construct
  misc_feature 1..22: note = Description of sequence: Deletion fragment, Named: NtHAP1a deletion fragment
  source 1..22: mol_type = other DNA
gttgctcgttttatgaaccata

SEQ ID NO: 353 - DNA, 76 bp, synthetic construct
  misc_feature 1..76: note = Description of sequence: Deletion fragment, Named: NtHAP1b deletion fragment
  source 1..76: mol_type = other DNA
agtgcaaaaaagggtggcaatgttgctcgttttatgaaccatagttgttcacctaacgtattctggcagcttgttg

SEQ ID NO: 354 - DNA, 38 bp, synthetic construct
  misc_feature 1..38: note = Description of sequence: Deletion fragment, Named: NtHAP1b deletion fragment
  source 1..38: mol_type = other DNA
tatgaaccatagttgttcacctaacgtattctggcagc

SEQ ID NO: 355 - DNA, 148 bp, synthetic construct
  misc_feature 1..148: note = Description of sequence: Deletion fragment, Named: NtHAP1a deletion fragment
  source 1..148: mol_type = other DNA
atctttagcctttttattggtgcatgatgtcctagaattgtattttttttaatggttttcttacttttttttcttgctgtagtaattggagattgtgcatggatctaggtggtaacaggaaaaagtgcagagctttgtatttgggtta

SEQ ID NO: 356 - DNA, 10 bp, synthetic construct
  misc_feature 1..10: note = Description of sequence: Deletion fragment, Named: NtHAP1a deletion fragment
  source 1..10: mol_type = other DNA
tggatctagg

SEQ ID NO: 357 - DNA, 51 bp, synthetic construct
  misc_feature 1..51: note = Description of sequence: Deletion fragment, Named: NtHAP1a deletion fragment
  source 1..51: mol_type = other DNA
accatagttgttcacctaacgtattctggcagcttgttgtacgtgaaaata

SEQ ID NO: 358 - DNA, 58 bp, synthetic construct
  misc_feature 1..58: note = Description of sequence: Deletion fragment, Named: NtHAP1b deletion fragment
  source 1..58: mol_type = other DNA
gggtggcaatgttgctcgttttatgaaccatagttgttcacctaacgtattctggcag

SEQ ID NO: 359 - DNA, 160 bp, synthetic construct
  misc_feature 1..160: note = Description of sequence: Deletion fragment, Named: NtHAP1a deletion fragment
  source 1..160: mol_type = other DNA
attggtgcatgatgtcctagaattgtattttttttaatggttttcttacttttttttcttgctgtagtaattggagattgtgcatggatctaggtggtaacaggaaaaagtgcagagctttgtatttgggttattaatgtgagtgaaagctgtgatcttt

SEQ ID NO: 360 - DNA, 160 bp, synthetic construct; identical to SEQ ID NO: 359
  misc_feature 1..160: note = Description of sequence: Deletion fragment, Named: NtHAP1a deletion fragment
  source 1..160: mol_type = other DNA

SEQ ID NO: 361 - DNA, 160 bp, synthetic construct; identical to SEQ ID NO: 359
  misc_feature 1..160: note = Description of sequence: Deletion fragment, Named: NtHAP1a deletion fragment
  source 1..160: mol_type = other DNA

SEQ ID NO: 362 - DNA, 17 bp, synthetic construct
  misc_feature 1..17: note = Description of sequence: Deletion fragment, Named: NtHAP1b deletion fragment
  source 1..17: mol_type = other DNA
tggatctaggtggtaac

SEQ ID NO: 363 - DNA, 160 bp, synthetic construct; identical to SEQ ID NO: 359
  misc_feature 1..160: note = Description of sequence: Deletion fragment, Named: NtHAP1a deletion fragment
  source 1..160: mol_type = other DNA

SEQ ID NO: 364 - DNA, 160 bp, synthetic construct; identical to SEQ ID NO: 359
  misc_feature 1..160: note = Description of sequence: Deletion fragment, Named: NtHAP1a deletion fragment
  source 1..160: mol_type = other DNA

SEQ ID NO: 365 - DNA, 23 bp, synthetic construct
  misc_feature 1..23: note = Description of sequence: Deletion fragment, Named: NtHAP1b deletion fragment
  source 1..23: mol_type = other DNA
gttgctcgttttatgaaccatag

SEQ ID NO: 366 - DNA, 108 bp, synthetic construct
  misc_feature 1..108: note = Description of sequence: Deletion fragment, Named: NtHAP1a deletion fragment
  source 1..108: mol_type = other DNA
tttaatggttttcttacttttttttcttgctgtagtaattggagattgtgcatggatctaggtggtaacaggaaaaagtgcagagctttgtatttgggttattaatgt

SEQ ID NO: 367 - DNA, 29 bp, synthetic construct
  misc_feature 1..29: note = Description of sequence: Deletion fragment, Named: NtHAP2 deletion fragment
  source 1..29: mol_type = other DNA
ttggttgattttgataatggaacaaggtt

SEQ ID NO: 368 - DNA, 50 bp, synthetic construct
  misc_feature 1..50: note = Description of sequence: Deletion fragment, Named: NtHAP1a deletion fragment
  source 1..50: mol_type = other DNA
ggttttcttacttttttttcttgctgtagtaattggagattgtgcatgga

SEQ ID NO: 369 - DNA, 11 bp, synthetic construct
  misc_feature 1..11: note = Description of sequence: Deletion fragment, Named: NtHAP1b deletion fragment
  source 1..11: mol_type = other DNA
atctaggtggt

SEQ ID NO: 370 - DNA, 48 bp, synthetic construct
  misc_feature 1..48: note = Description of sequence: Deletion fragment, Named: NtHAP1a deletion fragment
  source 1..48: mol_type = other DNA
aataagtgcaaaaaagggtggcaatgttgctcgttttatgaaccatag

SEQ ID NO: 371 - DNA, 18 bp, synthetic construct
  misc_feature 1..18: note = Description of sequence: Deletion fragment, Named: NtHAP1b deletion fragment
  source 1..18: mol_type = other DNA
atctaggtggtaactgga

SEQ ID NO: 372 - DNA, 139 bp, synthetic construct
  misc_feature 1..139: note = Description of sequence: Deletion fragment, Named: NtHAP1a deletion fragment
  source 1..139: mol_type = other DNA
aagtttgcatctttagcctttttattggtgcatgatgtcctagaattgtattttttttaatggttttcttacttttttttcttgctgtagtaattggagattgtgcatggatctaggtggtaacaggaaaaagtgcaga

SEQ ID NO: 373 - DNA, 45 bp, synthetic construct
  misc_feature 1..45: note = Description of sequence: Deletion fragment, Named: NtHAP1b deletion fragment
  source 1..45: mol_type = other DNA
tactttttttccttgctgtagtaattggagattgtgcatggatct

SEQ ID NO: 374 - DNA, 108 bp, synthetic construct; identical to SEQ ID NO: 366
  misc_feature 1..108: note = Description of sequence: Deletion fragment, Named: NtHAP1a deletion fragment
  source 1..108: mol_type = other DNA

SEQ ID NO: 375 - DNA, 43 bp, synthetic construct; identical to SEQ ID NO: 95
  misc_feature 1..43: note = Description of sequence: Deletion fragment, Named: NtHAP1a deletion fragment
  source 1..43: mol_type = other DNA

SEQ ID NO: 376 - DNA, 15 bp, synthetic construct
  misc_feature 1..15: note = Description of sequence: Deletion fragment, Named: NtHAP1a deletion fragment
  source 1..15: mol_type = other DNA
caccagacaaagcag

SEQ ID NO: 377 - DNA, 56 bp, synthetic construct
  misc_feature 1..56: note = Description of sequence: Deletion fragment, Named: NtHAP1a deletion fragment
  source 1..56: mol_type = other DNA
ttgacttttgattatggcatggttccaccagacaaagcagatcgtaggaggaagaa

SEQ ID NO: 378 - DNA, 56 bp, synthetic construct; identical to SEQ ID NO: 377
  misc_feature 1..56: note = Description of sequence: Deletion fragment, Named: NtHAP1a deletion fragment
  source 1..56: mol_type = other DNA

SEQ ID NO: 379 - DNA, 56 bp, synthetic construct; identical to SEQ ID NO: 377
  misc_feature 1..56: note = Description of sequence: Deletion fragment, Named: NtHAP1a deletion fragment
  source 1..56: mol_type = other DNA

SEQ ID NO: 380 - DNA, 56 bp, synthetic construct; identical to SEQ ID NO: 377
  misc_feature 1..56: note = Description of sequence: Deletion fragment, Named: NtHAP1a deletion fragment
  source 1..56: mol_type = other DNA

SEQ ID NO: 381 - DNA, 56 bp, synthetic construct; identical to SEQ ID NO: 377
  misc_feature 1..56: note = Description of sequence: Deletion fragment, Named: NtHAP1a deletion fragment
  source 1..56: mol_type = other DNA

SEQ ID NO: 382 - DNA, 56 bp, synthetic construct; identical to SEQ ID NO: 377
  misc_feature 1..56: note = Description of sequence: Deletion fragment, Named: NtHAP1a deletion fragment
  source 1..56: mol_type = other DNA

SEQ ID NO: 383 - DNA, 56 bp, synthetic construct; identical to SEQ ID NO: 377
  misc_feature 1..56: note = Description of sequence: Deletion fragment, Named: NtHAP1a deletion fragment
  source 1..56: mol_type = other DNA

SEQ ID NO: 384 - DNA, 52 bp, synthetic construct
  misc_feature 1..52: note = Description of sequence: Deletion fragment, Named: NtHAP1b deletion fragment
  source 1..52: mol_type = other DNA
caaagcagactgtaggaggaagaagtgcttgtgtgggtcattgaactgcaga

SEQ ID NO: 385 - protein, 647 aa, synthetic construct; identical to SEQ ID NO: 98
  REGION 1..647: note = Description of sequence: Mutant, Named: NtHAP1a mutant

SEQ ID NO: 386 - protein, 672 aa, synthetic construct
  REGION 1..672: note = Description of sequence: Mutant, Named: NtHAP1a mutant
MDQGFGSDSVPPAGSIDKSKVLDVKPMRCLMPVFPSPNGMSSVSTPQPSPFVCVPPSGPFPPGVSPFYPFLAPNGSGRSGENQESFGFGTPISPVPLNSFRTPTANGDTGPRRPGRPRATNVLAAEDDGVSDSQNQSDQFGSGYSVHVNDVEDTSTGKKRGRPRKTRMSHPANSHVEVDVDPILNQLLASFKLVDVDQVKKADGDKELVGRILLAFDVFRRRLTQIDEKRGETPGSARRPDLKAANLLMTRGARTNQTKRIGNVPGIEVGDIFFFRMELCLVGLHAPSMAGIDYMSVRLTGDEEPIAVSIVASGGYDDEGDDGDVLIYTGQGGVQRRDGQMFDQKLERGNLALEKSMHRGNEVRVIRGVIDVTNPRGKIYMYDGLYRIQESWAEKSKLGDCSIFRYKLLRVPGQPEAFTLWKSIQQWRDGTATRVGVILPDLTSGAESQPVCLVNDVDDEKGPAYFTYIPSLKYSKPYMKPNPSMGCQCVGGCQPGGSTCPCIQKNGGFLPFSSLGVLVSYKTLIHDCGSACSCPPNCRNRMSQAGPKARVEVFKTKNRGWGLRSWDPIRGGGFICEYAGEVVEESRVGELGNDGDDDYIFDATRMYEPLEPVRDYNDVSKKVPYPLVISAKKGGNVVHLTYSGSLLYVKITMRHTTTLPFLPLGIFLPCKN

SEQ ID NO: 387 - protein, 647 aa, synthetic construct; identical to SEQ ID NO: 97
  REGION 1..647: note = Description of sequence: Mutant, Named: NtHAP1a mutant

SEQ ID NO: 388 - protein, 654 aa, synthetic construct
  REGION 1..654: note = Description of sequence: Mutant, Named: NtHAP1b mutant
MEQGFGSDSVPPAGSIDKSKVLDVKPMRCLMPVFPSPNGMSSVSTPQPSPFVCVPPSGPFPTGVSPFYPFLAPNAAARSGENHEAFGFGTPISPVPLNSFRTPTANGDTGPRRPGRPRATNGLVAEDDGVSDSQNQSDQFGSGYSVHVNDVEDTSTGKKRGRPRKTRMSHPANSHVEVDVDPILNQLLASFKLVEFDQAKKADGDKELVGRILLAFDVFRRRLTQIDEKRGETPGSARRPDLKAANLLMTKGARTNQTKRVGNVPGIEVGDIFFFRMELCLVGLHAPSMAGIDYMSVRLTGDEEPIAVSIVASGGYDDEGDDGDVLIYTGQGGVQRRDGQMFDQKLERGNLALEKSMHRGNEVRVIRGVIDVTNPRGKIYMYDGLYRIQESWAEKSKLGDCSIFRYKLLRVPGQPEAFTLWKSIQQWRDGTATRVGVILPDLTSGAESQPVCLVNDVDDEKGPAYFTYIPSLKYSKPYMKPNPSMGCQCVGGCQPGGSACPCIQKNGGFLPFSSLGVLVSYKTLIHECGSACSCPPNCRNRMSQTGPKARVEVFKTKNRGWGLRSWDPIRGGGFMCEYAGEVVEESRVGELGNDGDDDYIFDATRMYEPLEPVRDYNDESKKVPYPLVIYVKITMRHTTTLPFLPLGIFLPCKN

SEQ ID NO: 389 - protein, 643 aa, synthetic construct
  REGION 1..643: note = Description of sequence: Mutant, Named: NtHAP1b mutant
MEQGFGSDSVPPAGSIDKSKVLDVKPMRCLMPVFPSPNGMSSVSTPQPSPFVCVPPSGPFPTGVSPFYPFLAPNAAARSGENHEAFGFGTPISPVPLNSFRTPTANGDTGPRRPGRPRATNGLVAEDDGVSDSQNQSDQFGSGYSVHVNDVEDTSTGKKRGRPRKTRMSHPANSHVEVDVDPILNQLLASFKLVEFDQAKKADGDKELVGRILLAFDVFRRRLTQIDEKRGETPGSARRPDLKAANLLMTKGARTNQTKRVGNVPGIEVGDIFFFRMELCLVGLHAPSMAGIDYMSVRLTGDEEPIAVSIVASGGYDDEGDDGDVLIYTGQGGVQRRDGQMFDQKLERGNLALEKSMHRGNEVRVIRGVIDVTNPRGKIYMYDGLYRIQESWAEKSKLGDCSIFRYKLLRVPGQPEAFTLWKSIQQWRDGTATRVGVILPDLTSGAESQPVCLVNDVDDEKGPAYFTYIPSLKYSKPYMKPNPSMGCQCVGGCQPGGSACPCIQKNGGFLPFSSLGVLVSYKTLIHECGSACSCPPNCRNRMSQTGPKARVEVFKTKNRGWGLRSWDPIRGGGFMCEYAGEVVEESRVGELGNDGDDDYIFDATRMYEPLEPVRDYNDESKKVPYPLVISAKKGGNVARFCCT

SEQ ID NO: 390 - protein, 647 aa, synthetic construct; identical to SEQ ID NO: 97
  REGION 1..647: note = Description of sequence: Mutant, Named: NtHAP1a mutant

SEQ ID NO: 391 - protein, 647 aa, synthetic construct; identical to SEQ ID NO: 98
  REGION 1..647: note = Description of sequence: Mutant, Named: NtHAP1a mutant

SEQ ID NO: 392 - protein, 647 aa, synthetic construct; identical to SEQ ID NO: 98
  REGION 1..647: note = Description of sequence: Mutant, Named: NtHAP1a mutant

SEQ ID NO: 393 - protein, 647 aa, synthetic construct; identical to SEQ ID NO: 99
  REGION 1..647: note = Description of sequence: Mutant, Named: NtHAP1b mutant

SEQ ID NO: 394 - protein, 710 aa, synthetic construct
  REGION 1..710: note = Description of sequence: Mutant, Named: NtHAP1a mutant
MDQGFGSDSVPPAGSIDKSKVLDVKPMRCLMPVFPSPNGMSSVSTPQPSPFVCVPPSGPFPPGVSPFYPFLAPNGSGRSGENQESFGFGTPISPVPLNSFRTPTANGDTGPRRPGRPRATNVLAAEDDGVSDSQNQSDQFGSGYSVHVNDVEDTSTGKKRGRPRKTRMSHPANSHVEVDVDPILNQLLASFKLVDVDQVKKADGDKELVGRILLAFDVFRRRLTQIDEKRGETPGSARRPDLKAANLLMTRGARTNQTKRIGNVPGIEVGDIFFFRMELCLVGLHAPSMAGIDYMSVRLTGDEEPIAVSIVASGGYDDEGDDGDVLIYTGQGGVQRRDGQMFDQKLERGNLALEKSMHRGNEVRVIRGVIDVTNPRGKIYMYDGLYRIQESWAEKSKLGDCSIFRYKLLRVPGQPEAFTLWKSIQQWRDGTATRVGVILPDLTSGAESQPVCLVNDVDDEKGPAYFTYIPSLKYSKPYMKPNPSMGCQCVGGCQPGGSTCPCIQKNGGFLPFSSLGVLVSYKTLIHDCGSACSCPPNCRNRMSQAGPKARVEVFKTKNRGWGLRSWDPIRGGGFICEYAGEVVEESRVGELGNDGDDDYIFDATRMYEPLEPVRDYNDVSKKVPYPLVISAKKGGNVARFMNHSSPNVFWQLVVRENNNETYYYIAFFAIRHIPPMQELTFDYGMVPPDKADRRRKKCLCGSLNCRGYFY

SEQ ID NO: 395 - protein, 694 aa, synthetic construct
  REGION 1..694: note = Description of sequence: Mutant, Named: NtHAP1a mutant
MDQGFGSDSVPPAGSIDKSKVLDVKPMRCLMPVFPSPNGMSSVSTPQPSPFVCVPPSGPFPPGVSPFYPFLAPNGSGRSGENQESFGFGTPISPVPLNSFRTPTANGDTGPRRPGRPRATNVLAAEDDGVSDSQNQSDQFGSGYSVHVNDVEDTSTGKKRGRPRKTRMSHPANSHVEVDVDPILNQLLASFKLVDVDQVKKADGDKELVGRILLAFDVFRRRLTQIDEKRGETPGSARRPDLKAANLLMTRGARTNQTKRIGNVPGIEVGDIFFFRMELCLVGLHAPSMAGIDYMSVRLTGDEEPIAVSIVASGGYDDEGDDGDVLIYTGQGGVQRRDGQMFDQKLERGNLALEKSMHRGNEVRVIRGVIDVTNPRGKIYMYDGLYRIQESWAEKSKLGDCSIFRYKLLRVPGQPEAFTLWKSIQQWRDGTATRVGVILPDLTSGAESQPVCLVNDVDDEKGPAYFTYIPSLKYSKPYMKPNPSMGCQCVGGCQPGGSTCPCIQKNGGFLPFSSLGVLVSYKTLIHDCGSACSCPPNCRNRMSQAGPKARVEVFKTKNRGWGLRSWDPIRGGGFICEYAGEVVEESRVGELGNDGDDDYIFDATRMYEPLEPVRDYNDVSKKVPYPLVISAKKGGNVARFMNNETYYYIAFFAIRHIPPMQELTFDYGMVPPDKADRRRKKCLCGSLNCRGYFY

SEQ ID NO: 396 - protein, 679 aa, synthetic construct; identical to SEQ ID NO: 108
  REGION 1..679: note = Description of sequence: Mutant, Named: NtHAP1b mutant

SEQ ID NO: 397 - protein, 709 aa, synthetic construct
  REGION 1..709: note = Description of sequence: Mutant, Named: NtHAP1b mutant
MEQGFGSDSVPPAGSIDKSKVLDVKPMRCLMPVFPSPNGMSSVSTPQPSPFVCVPPSGPFPTGVSPFYPFLAPNAAARSGENHEAFGFGTPISPVPLNSFRTPTANGDTGPRRPGRPRATNGLVAEDDGVSDSQNQSDQFGSGYSVHVNDVEDTSTGKKRGRPRKTRMSHPANSHVEVDVDPILNQLLASFKLVEFDQAKKADGDKELVGRILLAFDVFRRRLTQIDEKRGETPGSARRPDLKAANLLMTKGARTNQTKRVGNVPGIEVGDIFFFRMELCLVGLHAPSMAGIDYMSVRLTGDEEPIAVSIVASGGYDDEGDDGDVLIYTGQGGVQRRDGQMFDQKLERGNLALEKSMHRGNEVRVIRGVIDVTNPRGKIYMYDGLYRIQESWAEKSKLGDCSIFRYKLLRVPGQPEAFTLWKSIQQWRDGTATRVGVILPDLTSGAESQPVCLVNDVDDEKGPAYFTYIPSLKYSKPYMKPNPSMGCQCVGGCQPGGSACPCIQKNGGFLPFSSLGVLVSYKTLIHECGSACSCPPNCRNRMSQTGPKARVEVFKTKNRGWGLRSWDPIRGGGFMCEYAGEVVEESRVGELGNDGDDDYIFDATRMYEPLEPVRDYNDESKKVPYPLVISAKKGGNVARFMNHRPNVFWQLVVRENNNETYYHIAFFAIRHIPPMQELTFDYGMVPPDKADCRRKKCLCGSLNCRGYFY

SEQ ID NO: 398 - protein, 647 aa, synthetic construct; identical to SEQ ID NO: 97
  REGION 1..647: note = Description of sequence: Mutant, Named: NtHAP1a mutant

SEQ ID NO: 399 - protein, 679 aa, synthetic construct; identical to SEQ ID NO: 100
  REGION 1..679: note = Description of sequence: Mutant, Named: NtHAP1a mutant

SEQ ID NO: 400 - protein, 685 aa, synthetic construct
  REGION 1..685: note = Description of sequence: Mutant, Named: NtHAP1b mutant
MEQGFGSDSVPPAGSIDKSKVLDVKPMRCLMPVFPSPNGMSSVSTPQPSPFVCVPPSGPFPTGVSPFYPFLAPNAAARSGENHEAFGFGTPISPVPLNSFRTPTANGDTGPRRPGRPRATNGLVAEDDGVSDSQNQSDQFGSGYSVHVNDVEDTSTGKKRGRPRKTRMSHPANSHVEVDVDPILNQLLASFKLVEFDQAKKADGDKELVGRILLAFDVFRRRLTQIDEKRGETPGSARRPDLKAANLLMTKGARTNQTKRVGNVPGIEVGDIFFFRMELCLVGLHAPSMAGIDYMSVRLTGDEEPIAVSIVASGGYDDEGDDGDVLIYTGQGGVQRRDGQMFDQKLERGNLALEKSMHRGNEVRVIRGVIDVTNPRGKIYMYDGLYRIQESWAEKSKLGDCSIFRYKLLRVPGQPEAFTLWKSIQQWRDGTATRVGVILPDLTSGAESQPVCLVNDVDDEKGPAYFTYIPSLKYSKPYMKPNPSMGCQCVGGCQPGGSACPCIQKNGGFLPFSSLGVLVSYKTLIHECGSACSCPPNCRNRMSQTGPKARVEVFKTKNRGWGLRSWDPIRGGGFMCEYAGEVVEESRVGELGNDGDDDYIFDATRMYEPLEPVRDYNDESKKVPYPLVVRENNNETYYHIAFFAIRHIPPMQELTFDYGMVPPDKADCRRKKCLCGSLNCRGYFY

SEQ ID NO: 401 - protein, 647 aa, synthetic construct; identical to SEQ ID NO: 99
  REGION 1..647: note = Description of sequence: Mutant, Named: NtHAP1b mutant

SEQ ID NO: 402 - protein, 678 aa, synthetic construct
  REGION 1..678: note = Description of sequence: Mutant, Named: NtHAP1a mutant
MDQGFGSDSVPPAGSIDKSKVLDVKPMRCLMPVFPSPNGMSSVSTPQPSPFVCVPPSGPFPPGVSPFYPFLAPNGSGRSGENQESFGFGTPISPVPLNSFRTPTANGDTGPRRPGRPRATNVLAAEDDGVSDSQNQSDQFGSGYSVHVNDVEDTSTGKKRGRPRKTRMSHPANSHVEVDVDPILNQLLASFKLVDVDQVKKADGDKELVGRILLAFDVFRRRLTQIDEKRGETPGSARRPDLKAANLLMTRGARTNQTKRIGNVPGIEVGDIFFFRMELCLVGLHAPSMAGIDYMSVRLTGDEEPIAVSIVASGGYDDEGDDGDVLIYTGQGGVQRRDGQMFDQKLERGNLALEKSMHRGNEVRVIRGVIDVTNPRGKIYMYDGLYRIQESWAEKSKLGDCSIFRYKLLRVPGQPEAFTLWKSIQQWRDGTATRVGVILPDLTSGAESQPVCLVNDVDDEKGPAYFTYIPSLKYSKPYMKPNPSMGCQCVGGCQPGGSTCPCIQKNGGFLPFSSLGVLVSYKTLIHDCGSACSCPPNCRNRMSQAGPKARVEVFKTKNRGWGLRSWDPIRGGGFICEYAGEVVEESRVGELGNDGDDDYIFDATRMYEPLEPVRDYNDVSKKVPYPLVISAKKGGNVARFMNHIHLTYSGSLLYVKITMRHTTTLPFLPLGIFLPCKN

SEQ ID NO: 403 - protein, 647 aa, synthetic construct; identical to SEQ ID NO: 97
  REGION 1..647: note = Description of sequence: Mutant, Named: NtHAP1a mutant

SEQ ID NO: 404 - protein, 647 aa, synthetic construct; identical to SEQ ID NO: 99
  REGION 1..647: note = Description of sequence: Mutant, Named: NtHAP1b mutant

SEQ ID NO: 405 - protein, 709 aa, synthetic construct; identical to SEQ ID NO: 397
  REGION 1..709: note = Description of sequence: Mutant, Named: NtHAP1b mutant

SEQ ID NO: 406 - protein, 678 aa, synthetic construct; identical to SEQ ID NO: 402
  REGION 1..678: note = Description of sequence: Mutant, Named: NtHAP1a mutant

SEQ ID NO: 407 - protein, 647 aa, synthetic construct; identical to SEQ ID NO: 97
  REGION 1..647: note = Description of sequence: Mutant, Named: NtHAP1a mutant

SEQ ID NO: 408 - protein, 647 aa, synthetic construct; identical to SEQ ID NO: 99
  REGION 1..647: note = Description of sequence: Mutant, Named: NtHAP1b mutant

SEQ ID NO: 409 - protein, 709 aa, synthetic construct; identical to SEQ ID NO: 397
  REGION 1..709: note = Description of sequence: Mutant, Named: NtHAP1b mutant

SEQ ID NO: 410 - protein, 678 aa, synthetic construct; identical to SEQ ID NO: 402
  REGION 1..678: note = Description of sequence: Mutant, Named: NtHAP1a mutant

SEQ ID NO: 411 - protein, 647 aa, synthetic construct; identical to SEQ ID NO: 97
  REGION 1..647: note = Description of sequence: Mutant, Named: NtHAP1a mutant

SEQ ID NO: 412 - protein, 647 aa, synthetic construct; identical to SEQ ID NO: 99
  REGION 1..647: note = Description of sequence: Mutant, Named: NtHAP1b mutant

SEQ ID NO: 413 - protein, 709 aa, synthetic construct; identical to SEQ ID NO: 397
  REGION 1..709: note = Description of sequence: Mutant, Named: NtHAP1b mutant

SEQ ID NO: 414 - protein, 647 aa, synthetic construct; identical to SEQ ID NO: 97
  REGION 1..647: note = Description of sequence: Mutant, Named: NtHAP1a mutant

SEQ ID NO: 415 - protein, 647 aa, synthetic construct; identical to SEQ ID NO: 99
  REGION 1..647: note = Description of sequence: Mutant, Named: NtHAP1b mutant

SEQ ID NO: 416 - protein, 647 aa, synthetic construct; identical to SEQ ID NO: 97
  REGION 1..647: note = Description of sequence: Mutant, Named: NtHAP1a mutant

SEQ ID NO: 417 - protein, 647 aa, synthetic construct; identical to SEQ ID NO: 98
  REGION 1..647: note = Description of sequence: Mutant, Named: NtHAP1a mutant

SEQ ID NO: 418 - protein, 647 aa, synthetic construct; identical to SEQ ID NO: 117
  REGION 1..647: note = Description of sequence: Mutant, Named: NtHAP1b mutant

SEQ ID NO: 419 - protein, 678 aa, synthetic construct; identical to SEQ ID NO: 402
  REGION 1..678: note = Description of sequence: Mutant, Named: NtHAP1a mutant

SEQ ID NO: 420 - protein, 647 aa, synthetic construct; identical to SEQ ID NO: 97
  REGION 1..647: note = Description of sequence: Mutant, Named: NtHAP1a mutant

SEQ ID NO: 421 - protein, 647 aa, synthetic construct; identical to SEQ ID NO: 99
  REGION 1..647: note = Description of sequence: Mutant, Named: NtHAP1b mutant

SEQ ID NO: 422 - protein, 709 aa, synthetic construct; identical to SEQ ID NO: 397
  REGION 1..709: note = Description of sequence: Mutant, Named: NtHAP1b mutant

SEQ ID NO: 423 - protein, 678 aa, synthetic construct; identical to SEQ ID NO: 402
  REGION 1..678: note = Description of sequence: Mutant, Named: NtHAP1a mutant

SEQ ID NO: 424 - protein, 647 aa, synthetic construct; identical to SEQ ID NO: 97
  REGION 1..647: note = Description of sequence: Mutant, Named: NtHAP1a mutant

SEQ ID NO: 425 - protein, 647 aa, synthetic construct; identical to SEQ ID NO: 99
  REGION 1..647: note = Description of sequence: Mutant, Named: NtHAP1b mutant

SEQ ID NO: 426 - protein, 709 aa, synthetic construct; identical to SEQ ID NO: 397
  REGION 1..709: note = Description of sequence: Mutant, Named: NtHAP1b mutant

SEQ ID NO: 427 - protein, 679 aa, synthetic construct; identical to SEQ ID NO: 100
  REGION 1..679: note = Description of sequence: Mutant, Named: NtHAP1a mutant

SEQ ID NO: 428 - protein, 678 aa, synthetic construct
  REGION 1..678: note = Description of sequence: Mutant, Named: NtHAP1a mutant
MDQGFGSDSVPPAGSIDKSKVLDVKPMRCLMPVFPSPNGMSSVSTPQPSPFVCVPPSGPFPPGVSPFYPFLAPNGSGRSGENQESFGFGTPISPVPLNSFRTPTANGDTGPRRPGRPRATNVLAAEDDGVSDSQNQSDQFGSGYSVHVNDVEDTSTGKKRGRPRKTRMSHPANSHVEVDVDPILNQLLASFKLVDVDQVKKADGDKELVGRILLAFDVFRRRLTQIDEKRGETPGSARRPDLKAANLLMTRGARTNQTKRIGNVPGIEVGDIFFFRMELCLVGLHAPSMAGIDYMSVRLTGDEEPIAVSIVASGGYDDEGDDGDVLIYTGQGGVQRRDGQMFDQKLERGNLALEKSMHRGNEVRVIRGVIDVTNPRGKIYMYDGLYRIQESWAEKSKLGDCSIFRYKLLRVPGQPEAFTLWKSIQQWRDGTATRVGVILPDLTSGAESQPVCLVNDVDDEKGPAYFTYIPSLKYSKPYMKPNPSMGCQCVGGCQPGGSTCPCIQKNGGFLPFSSLGVLVSYKTLIHDCGSACSCPPNCRNRMSQAGPKARVEVFKTKNRGWGLRSWDPIRGGGFICEYAGEVVEESRVGELGNDGDDDYIFDATRMYEPLEPVRDYNDVSKKVPYPLVISAKKGGNVARFMNHSHLTYSGSLLYVKITMRHTTTLPFLPLGIFLPCKN

SEQ ID NO: 429 - protein, 703 aa, synthetic construct
  REGION 1..703: note = Description of sequence: Mutant, Named: NtHAP1b mutant
MEQGFGSDSVPPAGSIDKSKVLDVKPMRCLMPVFPSPNGMSSVSTPQPSPFVCVPPSGPFPTGVSPFYPFLAPNAAARSGENHEAFGFGTPISPVPLNSFRTPTANGDTGPRRPGRPRATNGLVAEDDGVSDSQNQSDQFGSGYSVHVNDVEDTSTGKKRGRPRKTRMSHPANSHVEVDVDPILNQLLASFKLVEFDQAKKADGDKELVGRILLAFDVFRRRLTQIDEKRGETPGSARRPDLKAANLLMTKGARTNQTKRVGNVPGIEVGDIFFFRMELCLVGLHAPSMAGIDYMSVRLTGDEEPIAVSIVASGGYDDEGDDGDVLIYTGQGGVQRRDGQMFDQKLERGNLALEKSMHRGNEVRVIRGVIDVTNPRGKIYMYDGLYRIQESWAEKSKLGDCSIFRYKLLRVPGQPEAFTLWKSIQQWRDGTATRVGVILPDLTSGAESQPVCLVNDVDDEKGPAYFTYIPSLKYSKPYMKPNPSMGCQCVGGCQPGGSACPCIQKNGGFLPFSSLGVLVSYKTLIHECGSACSCPPNCRNRMSQTGPKARVEVFKTKNRGWGLRSWDPIRGGGFMCEYAGEVVEESRVGELGNDGDDDYIFDATRMYEPLEPVRDYNDESKKVPYPLVISAKKGGICSPNVFWQLVVRENNNETYYHIAFFAIRHIPPMQELTFDYGMVPPDKADCRRKKCLCGSLNCRGYFY

SEQ ID NO: 430 - protein, 703 aa, synthetic construct; identical to SEQ ID NO: 429
  REGION 1..703: note = Description of sequence: Mutant, Named: NtHAP1b mutant

SEQ ID NO: 431 - protein, 647 aa, synthetic construct; identical to SEQ ID NO: 99
  REGION 1..647: note = Description of sequence: Mutant, Named: NtHAP1b mutant

SEQ ID NO: 432 - protein, 7 aa, synthetic construct
  REGION 1..7: note = Description of sequence: Mutant, Named: NtHAP2 mutant
MEQGLRS

SEQ ID NO: 433 - protein, 8 aa, synthetic construct
  REGION 1..8: note = Description of sequence: Mutant, Named: NtHAP2 mutant
MEQGLRSG

SEQ ID NO: 434 - protein, 647 aa, synthetic construct; identical to SEQ ID NO: 98
  REGION 1..647: note = Description of sequence: Mutant, Named: NtHAP1a mutant

SEQ ID NO: 435 - protein, 647 aa, synthetic construct; identical to SEQ ID NO: 99
  REGION 1..647: note = Description of sequence: Mutant, Named: NtHAP1b mutant

SEQ ID NO: 436 - protein, 678 aa, synthetic construct
  REGION 1..678: note = Description of sequence: Mutant, Named: NtHAP1b mutant
MEQGFGSDSVPPAGSIDKSKVLDVKPMRCLMPVFPSPNGMSSVSTPQPSPFVCVPPSGPFPTGVSPFYPFLAPNAAARSGENHEAFGFGTPISPVPLNSFRTPTANGDTGPRRPGRPRATNGLVAEDDGVSDSQNQSDQFGSGYSVHVNDVEDTSTGKKRGRPRKTRMSHPANSHVEVDVDPILNQLLASFKLVEFDQAKKADGDKELVGRILLAFDVFRRRLTQIDEKRGETPGSARRPDLKAANLLMTKGARTNQTKRVGNVPGIEVGDIFFFRMELCLVGLHAPSMAGIDYMSVRLTGDEEPIAVSIVASGGYDDEGDDGDVLIYTGQGGVQRRDGQMFDQKLERGNLALEKSMHRGNEVRVIRGVIDVTNPRGKIYMYDGLYRIQESWAEKSKLGDCSIFRYKLLRVPGQPEAFTLWKSIQQWRDGTATRVGVILPDLTSGAESQPVCLVNDVDDEKGPAYFTYIPSLKYSKPYMKPNPSMGCQCVGGCQPGGSACPCIQKNGGFLPFSSLGVLVSYKTLIHECGSACSCPPNCRNRMSQTGPKARVEVFKTKNRGWGLRSWDPIRGGGFMCEYAGEVVEESRVGELGNDGDDDYIFDATRMYEPLEPVRDYNDESKKVPYPLVISAKKGGNVARFMNHSHLTYSGSLLYVKITMRHTTTLPFLPLGIFLPCKN

SEQ ID NO: 437 - protein, 639 aa, synthetic construct
  REGION 1..639: note = Description of sequence: Mutant, Named: NtHAP2 mutant
MEQGLRSEGNNPPSIDKTRVLDVKPLRCLAPVFPSPNGMSSVSTPQPSPFVCVPPTGPFPPGVAPFYPFVAPNESGRPGESSQQTPSGVPNQGGPFGFAQPISPVPLNSFRTPTTANGNSGRSRRAVDDDDYSNSQDQNDQFASGFSVHVNNVEDSGTGKKRGRPKKPRRAQQAEGSTPLEVDVEPLLTQLLTSFKLVDFDQVKKADGDKELVGRVLLVFDLFRRRMTQIDESRDGSGSGRRPDLKASNMLMTKGVRTNQTKRIGNAPGIEVGDIFFFRMELCLVGLHAPTMAGIDYMSVKLTMDEEPLAVSIVSSGGYDDDGGDGDVLIYTGQGGVQRKDGQVFDQKLERGNLALEKSVHRANEVRVIRGVKDVAYPTGKIYIYDGLYKIQESWAEKNKVGCNVFKYKLLRVPGQPEAFKVWKSIQQWKDGVASRVGVILPDLTSGAESQPVCLVNDVDDEKGPAYFTYIPSLKYSKPFVMPRPSPSCHCVGGCQPGDSNCACIQSNGGFLPYSSLGVLLSYKALIHECGSACSCPPNCRNRMSQGGPKARLEVFKTKNRGWGLRSWDPIRGGGFICEYAGEVIDAGNYSDDNYIFDATRIYAPLEAERDYNDESRKVPFPLVHKCQEWWKYFSLYEP

SEQ ID NO: 438 - protein, 624 aa, synthetic construct
  REGION 1..624: note = Description of sequence: Mutant, Named: NtHAP2 mutant
MEQGLRSEGNNPPSIDKTRVLDVKPLRCLAPVFPSPNGMSSVSTPQPSPFVCVPPTGPFPPGVAPFYPFVAPNESGRPGESSQQTPSGVPNQGGPFGFAQPISPVPLNSFRTPTTANGNSGRSRRAVDDDDYSNSQDQNDQFASGFSVHVNNVEDSGTGKKRGRPKKPRRAQQAEGSTPLEVDVEPLLTQLLTSFKLVDFDQVKKADGDKELVGRVLLVFDLFRRRMTQIDESRDGSGSGRRPDLKASNMLMTKGVRTNQTKRIGNAPGIEVGDIFFFRMELCLVGLHAPTMAGIDYMSVKLTMDEEPLAVSIVSSGGYDDDGGDGDVLIYTGQGGVQRKDGQVFDQKLERGNLALEKSVHRANEVRVIRGVKDVAYPTGKIYIYDGLYKIQESWAEKNKVGCNVFKYKLLRVPGQPEAFKVWKSIQQWKDGVASRVGVILPDLTSGAESQPVCLVNDVDDEKGPAYFTYIPSLKYSKPFVMPRPSPSCHCVGGCQPGDSNCACIQSNGGFLPYSSLGVLLSYKALIHECGSACSCPPNCRNRMSQGGPKARLEVFKTKNRGWGLRSWDPIRGGGFICEYAGEVIDAGNYSDDNYIFDATRIYAPLEAERDYNDESRKVPFPLV

SEQ ID NO: 439 - protein, 639 aa, synthetic construct; identical to SEQ ID NO: 437
  REGION 1..639: note = Description of sequence: Mutant, Named: NtHAP2 mutant

SEQ ID NO: 440 - protein, 624 aa, synthetic construct; identical to SEQ ID NO: 438
  REGION 1..624: note = Description of sequence: Mutant, Named: NtHAP2 mutant

SEQ ID NO: 441 - protein, 647 aa, synthetic construct; identical to SEQ ID NO: 99
  REGION 1..647: note = Description of sequence: Mutant, Named: NtHAP1b mutant

SEQ ID NO: 442 - protein, 7 aa, synthetic construct
  REGION 1..7: note = Description of sequence: Mutant, Named: NtHAP2 mutant
MEQGLRS

SEQ ID NO: 443 - protein, 624 aa, synthetic construct; identical to SEQ ID NO: 438
  REGION 1..624: note = Description of sequence: Mutant, Named: NtHAP2 mutant

SEQ ID NO: 444 - protein, 647 aa, synthetic construct; identical to SEQ ID NO: 117
  REGION 1..647: note = Description of sequence: Mutant, Named: NtHAP1b mutant

SEQ ID NO: 445 - protein, 647 aa, synthetic construct; identical to SEQ ID NO: 99
  REGION 1..647: note = Description of sequence: Mutant, Named: NtHAP1b mutant

SEQ ID NO: 446 - protein, 624 aa, synthetic construct; identical to SEQ ID NO: 438
  REGION 1..624: note = Description of sequence: Mutant, Named: NtHAP2 mutant

SEQ ID NO: 447 - protein, 639 aa, synthetic construct; identical to SEQ ID NO: 437
  REGION 1..639: note = Description of sequence: Mutant, Named: NtHAP2 mutant

SEQ ID NO: 448 - protein, 647 aa, synthetic construct; identical to SEQ ID NO: 98
  REGION 1..647: note = Description of sequence: Mutant, Named: NtHAP1a mutant

SEQ ID NO: 449 - protein, 647 aa, synthetic construct; identical to SEQ ID NO: 117
  REGION 1..647: note = Description of sequence: Mutant, Named: NtHAP1b mutant

SEQ ID NO: 450 - protein, 639 aa, synthetic construct; identical to SEQ ID NO: 437
  REGION 1..639: note = Description of sequence: Mutant, Named: NtHAP2 mutant

SEQ ID NO: 451 - protein, 639 aa, synthetic construct; identical to SEQ ID NO: 437
  REGION 1..639: note = Description of sequence: Mutant, Named: NtHAP2 mutant

SEQ ID NO: 452 - protein, 647 aa, synthetic construct; identical to SEQ ID NO: 98
  REGION 1..647: note = Description of sequence: Mutant, Named: NtHAP1a mutant

SEQ ID NO: 453 - protein, 647 aa, synthetic construct; identical to SEQ ID NO: 117
  REGION 1..647: note = Description of sequence: Mutant, Named: NtHAP1b mutant

SEQ ID NO: 454 - protein, 639 aa, synthetic construct; identical to SEQ ID NO: 437
  REGION 1..639: note = Description of sequence: Mutant, Named: NtHAP2 mutant

SEQ ID NO: 455 - protein, 644 aa, synthetic construct
  REGION 1..644: note = Description of sequence: Mutant, Named: NtHAP1b mutant
MEQGFGSDSVPPAGSIDKSKVLDVKPMRCLMPVFPSPNGMSSVSTPQPSPFVCVPPSGPFPTGVSPFYPFLAPNAAARSGENHEAFGFGTPISPVPLNSFRTPTANGDTGPRRPGRPRATNGLVAEDDGVSDSQNQSDQFGSGYSVHVNDVEDTSTGKKRGRPRKTRMSHPANSHVEVDVDPILNQLLASFKLVEFDQAKKADGDKELVGRILLAFDVFRRRLTQIDEKRGETPGSARRPDLKAANLLMTKGARTNQTKRVGNVPGIEVGDIFFFRMELCLVGLHAPSMAGIDYMSVRLTGDEEPIAVSIVASGGYDDEGDDGDVLIYTGQGGVQRRDGQMFDQKLERGNLALEKSMHRGNEVRVIRGVIDVTNPRGKIYMYDGLYRIQESWAEKSKLGDCSIFRYKLLRVPGQPEAFTLWKSIQQWRDGTATRVGVILPDLTSGAESQPVCLVNDVDDEKGPAYFTYIPSLKYSKPYMKPNPSMGCQCVGGCQPGGSACPCIQKNGGFLPFSSLGVLVSYKTLIHECGSACSCPPNCRNRMSQTGPKARVEVFKTKNRGWGLRSWDPIRGGGFMCEYAGEVVEESRVGELGNDGDDDYIFDATRMYEPLEPVRDYNDESKKVPYPLVISAKKGGNVARFMNHT

SEQ ID NO: 456 - protein, 639 aa, synthetic construct; identical to SEQ ID NO: 437
  REGION 1..639: note = Description of sequence: Mutant, Named: NtHAP2 mutant

SEQ ID NO: 457 - protein, 695 aa, synthetic construct
  REGION 1..695: note = Description of sequence: Mutant, Named: NtHAP1a mutant
MDQGFGSDSVPPAGSIDKSKVLDVKPMRCLMPVFPSPNGMSSVSTPQPSPFVCVPPSGPFPPGVSPFYPFLAPNGSGRSGENQESFGFGTPISPVPLNSFRTPTANGDTGPRRPGRPRATNVLAAEDDGVSDSQNQSDQFGSGYSVHVNDVEDTSTGKKRGRPRKTRMSHPANSHVEVDVDPILNQLLASFKLVDVDQVKKADGDKELVGRILLAFDVFRRRLTQIDEKRGETPGSARRPDLKAANLLMTRGARTNQTKRIGNVPGIEVGDIFFFRMELCLVGLHAPSMAGIDYMSVRLTGDEEPIAVSIVASGGYDDEGDDGDVLIYTGQGGVQRRDGQMFDQKLERGNLALEKSMHRGNEVRVIRGVIDVTNPRGKIYMYDGLYRIQESWAEKSKLGDCSIFRYKLLRVPGQPEAFTLWKSIQQWRDGTATRVGVILPDLTSGAESQPVCLVNDVDDEKGPAYFTYIPSLKYSKPYMKPNPSMGCQCVGGCQPGGSTCPCIQKNGGFLPFSSLGVLVSYKTLIHDCGSACSCPPNCRNRMSQAGPKARVEVFKTKNRGWGLRSWDPIRGGGFICEYAGEVVEESRVGELGNDGDDDYIFDATRMYEPLEPVRDYNDVSKKVPYPLVCSPNVFWQLVVRENNNETYYYIAFFAIRHIPPMQELTFDYGMVPPDKADRRRKKCLCGSLNCRGYFY

SEQ ID NO: 458 - protein, 624 aa, synthetic construct
  REGION 1..624: note = Description of sequence: Mutant, Named: NtHAP2 mutant
MEQGLRSEGNNPPSIDKTRVLDVKPLRCLAPVFPSPNGMSSVSTPQPSPFVCVPPTGPFPPGVAPFYPFVAPNESGRPGESSQQTPSGVPNQGGPFGFAQPISPVPLNSFRTPTTANGNSGRSRRAVDDDDYSNSQDQNDQFASGFSVHVNNVEDSGTGKKRGRPKKPRRAQQAEGSTPLEVDVEPLLTQLLTSFKLVDFDQVKKADGDKELVGRVLLVFDLFRRRMTQIDESRDGSGSGRRPDLKASNMLMTKGVRTNQTKRIGNAPGIEVGDIFFFRMELCLVGLHAPTMAGIDYMSVKLTMDEEPLAVSIVSSGGYDDDGGDGDVLIYTGQGGVQRKDGQVFDQKLERGNLALEKSVHRANEVRVIRGVKDVAYPTGKIYIYDGLYKIQESWAEKNKVGCNVFKYKLLRVPGQPEAFKVWKSIQQWKDGVASRVGVILPDLTSGAESQPVCLVNDVDDEKGPAYFTYIPSLKYSKPFVMPRPSPSCHCVGGCQPGDSNCACIQSNGGFLPYSSLGVLLSYKALIHECGSACSCPPNCRNRMSQGGPKARLEVFKTKNRGWGLRSWDPIRGGGFICEYAGEVIDAGNYSDDNYIFDATRIYAPLEAERDYNDESRKVPFPLA

SEQ ID NO: 459 - protein, 647 aa, synthetic construct; identical to SEQ ID NO: 97
  REGION 1..647: note = Description of sequence: Mutant, Named: NtHAP1a mutant

SEQ ID NO: 460 - protein, 647 aa, synthetic construct; identical to SEQ ID NO: 117
  REGION 1..647: note = Description of sequence: Mutant, Named: NtHAP1b mutant

SEQ ID NO: 461 - protein, 634 aa, synthetic construct
  REGION 1..634: note = Description of sequence: Mutant, Named: NtHAP2 mutant
MEQGLRSEGNNPPSIDKTRVLDVKPLRCLAPVFPSPNGMSSVSTPQPSPFVCVPPTGPFPPGVAPFYPFVAPNESGRPGESSQQTPSGVPNQGGPFGFAQPISPVPLNSFRTPTTANGNSGRSRRAVDDDDYSNSQDQNDQFASGFSVHVNNVEDSGTGKKRGRPKKPRRAQQAEGSTPLEVDVEPLLTQLLTSFKLVDFDQVKKADGDKELVGRVLLVFDLFRRRMTQIDESRDGSGSGRRPDLKASNMLMTKGVRTNQTKRIGNAPGIEVGDIFFFRMELCLVGLHAPTMAGIDYMSVKLTMDEEPLAVSIVSSGGYDDDGGDGDVLIYTGQGGVQRKDGQVFDQKLERGNLALEKSVHRANEVRVIRGVKDVAYPTGKIYIYDGLYKIQESWAEKNKVGCNVFKYKLLRVPGQPEAFKVWKSIQQWKDGVASRVGVILPDLTSGAESQPVCLVNDVDDEKGPAYFTYIPSLKYSKPFVMPRPSPSCHCVGGCQPGDSNCACIQSNGGFLPYSSLGVLLSYKALIHECGSACSCPPNCRNRMSQGGPKARLEVFKTKNRGWGLRSWDPIRGGGFICEYAGEVIDAGNYSDDNYIFDATRIYAPLEAERDYNDESRKVPFPLVPRMVEIFLAL

SEQ ID NO: 462 - protein, 639 aa, synthetic construct; identical to SEQ ID NO: 437
  REGION 1..639: note = Description of sequence: Mutant, Named: NtHAP2 mutant

SEQ ID NO: 463 - protein, 639 aa, synthetic construct; identical to SEQ ID NO: 437
  REGION 1..639: note = Description of sequence: Mutant, Named: NtHAP2 mutant

SEQ ID NO: 464 - protein, 639 aa, synthetic construct; identical to SEQ ID NO: 437
  REGION 1..639: note = Description of sequence: Mutant, Named: NtHAP2 mutant

SEQ ID NO: 465 - protein, 709 aa, synthetic construct
  REGION 1..709: note = Description of sequence: Mutant, Named: NtHAP1a mutant
MDQGFGSDSVPPAGSIDKSKVLDVKPMRCLMPVFPSPNGMSSVSTPQPSPFVCVPPSGPFPPGVSPFYPFLAPNGSGRSGENQESFGFGTPISPVPLNSFRTPTANGDTGPRRPGRPRATNVLAAEDDGVSDSQNQSDQFGSGYSVHVNDVEDTSTGKKRGRPRKTRMSHPANSHVEVDVDPILNQLLASFKLVDVDQVKKADGDKELVGRILLAFDVFRRRLTQIDEKRGETPGSARRPDLKAANLLMTRGARTNQTKRIGNVPGIEVGDIFFFRELCLVGLHAPSMAGIDYMSVRLTGDEEPIAVSIVASGGYDDEGDDGDVLIYTGQGGVQRRDGQMFDQKLERGNLALEKSMHRGNEVRVIRGVIDVTNPRGKIYMYDGLYRIQESWAEKSKLGDCSIFRYKLLRVPGQPEAFTLWKSIQQWRDGTATRVGVILPDLTSGAESQPVCLVNDVDDEKGPAYFTYIPSLKYSKPYMKPNPSMGCQCVGGCQPGGSTCPCIQKNGGFLPFSSLGVLVSYKTLIHDCGSACSCPPNCRNRMSQAGPKARVEVFKTKNRGWGLRSWDPIRGGGFICEYAGEVVEESRVGELGNDGDDDYIFDATRMYEPLEPVRDYNDVSKKVPYPLVISAKKGGNVARFMNHCSPNVFWQLVVRENNNETYYYIAFFAIRHIPPMQELTFDYGMVPPDKADRRRKKCLCGSLNCRGYFY

SEQ ID NO: 466 - protein, 647 aa, synthetic construct; identical to SEQ ID NO: 98
  REGION 1..647: note = Description of sequence: Mutant, Named: NtHAP1a mutant

SEQ ID NO: 467 - protein, 639 aa, synthetic construct; identical to SEQ ID NO: 437
  REGION 1..639: note = Description of sequence: Mutant, Named: NtHAP2 mutant

SEQ ID NO: 468 - protein, 647 aa, synthetic construct; identical to SEQ ID NO: 99
  REGION 1..647: note = Description of sequence: Mutant, Named: NtHAP1b mutant

SEQ ID NO: 469 - protein, 7 aa, synthetic construct
  REGION 1..7: note = Description of sequence: Mutant, Named: NtHAP2 mutant
MEQGLRS

SEQ ID NO: 470 - protein, 624 aa, synthetic construct; identical to SEQ ID NO: 438
  REGION 1..624: note = Description of sequence: Mutant, Named: NtHAP2 mutant

SEQ ID NO: 471 - protein, 647 aa, synthetic construct; identical to SEQ ID NO: 98
  REGION 1..647: note = Description of sequence: Mutant, Named: NtHAP1a mutant

SEQ ID NO: 472 - protein, 647 aa, synthetic construct; identical to SEQ ID NO: 99
  REGION 1..647: note = Description of sequence: Mutant, Named: NtHAP1b mutant

SEQ ID NO: 473 - protein, 712 aa, synthetic construct; identical to SEQ ID NO: 132
  REGION 1..712: note = Description of sequence: Mutant, Named: NtHAP1a mutant

SEQ ID NO: 474 - protein, 694 aa, synthetic construct; identical to SEQ ID NO: 130
  REGION 1..694: note = Description of sequence: Mutant, Named: NtHAP1a mutant

SEQ ID NO: 475 - protein, 701 aa, synthetic construct
  REGION 1..701: note = Description of sequence: Mutant, Named: NtHAP1a mutant
MDQGFGSDSVPPAGSIDKSKVLDVKPMRCLMPVFPSPNGMSSVSTPQPSPFVCVPPSGPFPPGVSPFYPFLAPNGSGRSGENQESFGFGTPISPVPLNSFRTPTANGDTGPRRPGRPRATNVLAAEDDGVSDSQNQSDQFGSGYSVHVNDVEDTSTGKKRGRPRKTRMSHPANSHVEVDVDPILNQLLASFKLVDVDQVKKADGDKELVGRILLAFDVFRRRLTQIDEKRGETPGSARRPDLKAANLLMTRGARTNQTKRIGNVPGIEVGDIFFFRMELCLVGLHAPSMAGIDYMSVRLTGDEEPIAVSIVASGGYDDEGDDGDVLIYTGQGGVQRRDGQMFDQKLERGNLALEKSMHRGNEVRVIRGVIDVTNPRGKIYMYDGLYRIQESWAEKSKLGDCSIFRYKLLRVPGQPEAFTLWKSIQQWRDGTATRVGVILPDLTSGAESQPVCLVNDVDDEKGPAYFTYIPSLKYSKPYMKPNPSMGCQCVGGCQPGGSTCPCIQKNGGFLPFSSLGVLVSYKTLIHDCGSACSCPPNCRNRMSQAGPKARVEVFKTKNRGWGLRSWDPIRGGGFICEYAGEVVEESRVGELGNDGDDDYIFDATRMYEPLEPVRDYNDVSKKVPYPLVISAKKGGNVARFMNHSCSPNVFWQLVVRENNNETYYYIAFFAIRHIPPMQELTFDYGMVPPDNVGGRSACVGH

SEQ ID NO: 476 - protein, 693 aa, synthetic construct
  REGION 1..693: note = Description of sequence: Mutant, Named: NtHAP1a mutant
MDQGFGSDSVPPAGSIDKSKVLDVKPMRCLMPVFPSPNGMSSVSTPQPSPFVCVPPSGPFPPGVSPFYPFLAPNGSGRSGENQESFGFGTPISPVPLNSFRTPTANGDTGPRRPGRPRATNVLAAEDDGVSDSQNQSDQFGSGYSVHVNDVEDTSTGKKRGRPRKTRMSHPANSHVEVDVDPILNQLLASFKLVDVDQVKKADGDKELVGRILLAFDVFRRRLTQIDEKRGETPGSARRPDLKAANLLMTRGARTNQTKRIGNVPGIEVGDIFFFRMELCLVGLHAPSMAGIDYMSVRLTGDEEPIAVSIVASGGYDDEGDDGDVLIYTGQGGVQRRDGQMFDQKLERGNLALEKSMHRGNEVRVIRGVIDVTNPRGKIYMYDGLYRIQESWAEKSKLGDCSIFRYKLLRVPGQPEAFTLWKSIQQWRDGTATRVGVILPDLTSGAESQPVCLVNDVDDEKGPAYFTYIPSLKYSKPYMKPNPSMGCQCVGGCQPGGSTCPCIQKNGGFLPFSSLGVLVSYKTLIHDCGSACSCPPNCRNRMSQAGPKARVEVFKTKNRGWGLRSWDPIRGGGFICEYAGEVVEESRVGELGNDGDDDYIFDATRMYEPLEPVRDYNDVSKKVPYPLVISAKKGGNVARFMNHSCSPNVFWQLVVRENNNETYYYIAFFAIRHIPPMQELTFLPLGRSACVGH

SEQ ID NO: 477 - protein, 693 aa, synthetic construct; identical to SEQ ID NO: 476
  REGION 1..693: note = Description of sequence: Mutant, Named: NtHAP1a mutant

SEQ ID NO: 478 - protein, 693 aa, synthetic construct; identical to SEQ ID NO: 476
  REGION 1..693: note = Description of sequence: Mutant, Named: NtHAP1a mutant

SEQ ID NO: 479 - protein, 693 aa, synthetic construct; identical to SEQ ID NO: 476
  REGION 1..693: note = Description of sequence: Mutant, Named: NtHAP1a mutant

SEQ ID NO: 480 - protein, 694 aa, synthetic construct; identical to SEQ ID NO: 130
  REGION 1..694: note = Description of sequence: Mutant, Named: NtHAP1a mutant

SEQ ID NO: 481 - protein, 693 aa, synthetic construct; identical to SEQ ID NO: 476
  REGION 1..693: note = Description of sequence: Mutant, Named: NtHAP1a mutant

SEQ ID NO: 482 - protein, 693 aa, synthetic construct; identical to SEQ ID NO: 476
  REGION 1..693: note = Description of sequence: Mutant, Named: NtHAP1a mutant

SEQ ID NO: 483 - protein, 701 aa, synthetic construct; identical to SEQ ID NO: 475
  REGION 1..701: note = Description of sequence: Mutant, Named: NtHAP1a mutant

SEQ ID NO: 484 - protein, 671 aa, synthetic construct
  REGION 1..671: note = Description of sequence: Mutant, Named: NtHAP1a mutant
MDQGFGSDSVPPAGSIDKSKVLDVKPMRCLMPVFPSPNGMSSVSTPQPSPFVCVPPSGPFPPGVSPFYPFLAPNGSGRSGENQESFGFGTPISPVPLNSFRTPTANGDTGPRRPGRPRATNVLAAEDDGVSDSQNQSDQFGSGYSVHVNDVEDTSTGKKRGRPRKTRMSHPANSHVEVDVDPILNQLLASFKLVDVDQVKKADGDKELVGRILLAFDVFRRRLTQIDEKRGETPGSARRPDLKAANLLMTRGARTNQTKRIGNVPGIEVGDIFFFRMELCLVGLHAPSMAGIDYMSVRLTGDEEPIAVSIVASGGYDDEGDDGDVLIYTGQGGVQRRDGQMFDQKLERGNLALEKSMHRGNEVRVIRGVIDVTNPRGKIYMYDGLYRIQESWAEKSKLGDCSIFRYKLLRVPGQPEAFTLWKSIQQWRDGTATRVGVILPDLTSGAESQPVCLVNDVDDEKGPAYFTYIPSLKYSKPYMKPNPSMGCQCVGGCQPGGSTCPCIQKNGGFLPFSSLGVLVSYKTLIHDCGSACSCPPNCRNRMSQAGPKARVEVFKTKNRGWGLRSWDPIRGGGFICEYAGEVVEESRVGELGNDGDDDYIFDATRMYEPLEPVRDYNDVSKKVPYPLVISAKKGGNVARFMNHSCSPNVFWQLVVRENNNETYYYIAFFCH

SEQ ID NO: 485 - protein, 671 aa, synthetic construct; identical to SEQ ID NO: 484
  REGION 1..671: note = Description of sequence: Mutant, Named: NtHAP1a mutant

SEQ ID NO: 486 - protein, 671 aa, synthetic construct; identical to SEQ ID NO: 484
  REGION 1..671: note = Description of sequence: Mutant, Named: NtHAP1a mutant

SEQ ID NO: 487 - protein, 671 aa, synthetic construct; identical to SEQ ID NO: 484
  REGION 1..671: note = Description of sequence: Mutant, Named: NtHAP1a mutant

SEQ ID NO: 488 - protein, 694 aa, synthetic construct; identical to SEQ ID NO: 130
  REGION 1..694: note = Description of sequence: Mutant, Named: NtHAP1a mutant

SEQ ID NO: 489 - protein, 671 aa, synthetic construct; identical to SEQ ID NO: 484
  REGION 1..671: note = Description of sequence: Mutant, Named: NtHAP1a mutant

SEQ ID NO: 490 - protein, 671 aa, synthetic construct; identical to SEQ ID NO: 484
  REGION 1..671: note = Description of sequence: Mutant, Named: NtHAP1a mutant

SEQ ID NO: 491 - protein, 671 aa, synthetic construct; identical to SEQ ID NO: 484
  REGION 1..671: note = Description of sequence: Mutant, Named: NtHAP1a mutant

SEQ ID NO: 492 - protein, 671 aa, synthetic construct; identical to SEQ ID NO: 484
  REGION 1..671: note = Description of sequence: Mutant, Named: NtHAP1a mutant

SEQ ID NO: 493 - protein, 694 aa, synthetic construct; identical to SEQ ID NO: 130
  REGION 1..694: note = Description of sequence: Mutant, Named: NtHAP1a mutant

SEQ ID NO: 494 - protein, 671 aa, synthetic construct; identical to SEQ ID NO: 484
  REGION 1..671: note = Description of sequence: Mutant, Named: NtHAP1a mutant

SEQ ID NO: 495 - protein, 671 aa, synthetic construct; identical to SEQ ID NO: 484
  REGION 1..671: note = Description of sequence: Mutant, Named: NtHAP1a mutant

SEQ ID NO: 496 - protein, 671 aa, synthetic construct; identical to SEQ ID NO: 484
  REGION 1..671: note = Description of sequence: Mutant, Named: NtHAP1a mutant

SEQ ID NO: 497 - protein, 671 aa, synthetic construct; identical to SEQ ID NO: 484
  REGION 1..671: note = Description of sequence: Mutant, Named: NtHAP1a mutant

SEQ ID NO: 498 - protein, 694 aa, synthetic construct; identical to SEQ ID NO: 130
  REGION 1..694: note = Description of sequence: Mutant, Named: NtHAP1a mutant

SEQ ID NO: 499 - protein, 671 aa, synthetic construct; identical to SEQ ID NO: 484
  REGION 1..671: note = Description of sequence: Mutant, Named: NtHAP1a mutant

SEQ ID NO: 500 - protein, 671 aa, synthetic construct; identical to SEQ ID NO: 484
  REGION 1..671: note = Description of sequence: Mutant, Named: NtHAP1a mutant

SEQ ID NO: 501 - protein, 671 aa, synthetic construct; identical to SEQ ID NO: 484
  REGION 1..671: note = Description of sequence: Mutant, Named: NtHAP1a mutant

SEQ ID NO: 502 - protein, 671 aa, synthetic construct; identical to SEQ ID NO: 484
  REGION 1..671: note = Description of sequence: Mutant, Named: NtHAP1a mutant

SEQ ID NO: 503 - protein, 694 aa, synthetic construct; identical to SEQ ID NO: 130
  REGION 1..694: note = Description of sequence: Mutant, Named: NtHAP1a mutant

SEQ ID NO: 504 - protein, 671 aa, synthetic construct; identical to SEQ ID NO: 484
  REGION 1..671: note = Description of sequence: Mutant, Named: NtHAP1a mutant

SEQ ID NO: 505 - protein, 671 aa, synthetic construct; identical to SEQ ID NO: 484
  REGION 1..671: note = Description of sequence: Mutant, Named: NtHAP1a mutant

SEQ ID NO: 506 - protein, 671 aa, synthetic construct; identical to SEQ ID NO: 484
  REGION 1..671: note = Description of sequence: Mutant, Named: NtHAP1a mutant

SEQ ID NO: 507 - protein, 671 aa, synthetic construct; identical to SEQ ID NO: 484
  REGION 1..671: note = Description of sequence: Mutant, Named: NtHAP1a mutant

SEQ ID NO: 508 - protein, 694 aa, synthetic construct; identical to SEQ ID NO: 130
  REGION 1..694: note = Description of sequence: Mutant, Named: NtHAP1a mutant

SEQ ID NO: 509 - protein, 671 aa, synthetic construct; identical to SEQ ID NO: 484
  REGION 1..671: note = Description of sequence: Mutant, Named: NtHAP1a mutant

SEQ ID NO: 510 - protein, 671 aa, synthetic construct; identical to SEQ ID NO: 484
  REGION 1..671: note = Description of sequence: Mutant, Named: NtHAP1a mutant

SEQ ID NO: 511 - protein, 671 aa, synthetic construct; identical to SEQ ID NO: 484
  REGION 1..671: note = Description of sequence: Mutant, Named: NtHAP1a mutant

SEQ ID NO: 512 - protein, 671 aa, synthetic construct; identical to SEQ ID NO: 484
  REGION 1..671: note = Description of sequence: Mutant, Named: NtHAP1a mutant

SEQ ID NO: 513 - protein, 694 aa, synthetic construct; identical to SEQ ID NO: 130
  REGION 1..694: note = Description of sequence: Mutant, Named: NtHAP1a mutant

SEQ ID NO: 514 - protein, 694 aa, synthetic construct; identical to SEQ ID NO: 126
  REGION 1..694: note = Description of sequence: Mutant, Named: NtHAP1a mutant

SEQ ID NO: 515 - protein, 671 aa, synthetic construct; identical to SEQ ID NO: 484
  REGION 1..671: note = Description of sequence: Mutant, Named: NtHAP1a mutant

SEQ ID NO: 516 - protein, 671 aa, synthetic construct; identical to SEQ ID NO: 484
  REGION 1..671: note = Description of sequence: Mutant, Named: NtHAP1a mutant

SEQ ID NO: 517 - protein, 671 aa, synthetic construct; identical to SEQ ID NO: 484
  REGION 1..671: note = Description of sequence: Mutant, Named: NtHAP1a mutant

SEQ ID NO: 518 - protein, 671 aa, synthetic construct; identical to SEQ ID NO: 484
  REGION 1..671: note = Description of sequence: Mutant, Named: NtHAP1a mutant

SEQ ID NO: 519 - protein, 694 aa, synthetic construct; identical to SEQ ID NO: 130
  REGION 1..694: note = Description of sequence: Mutant, Named: NtHAP1a mutant

SEQ ID NO: 520 - protein, 709 aa, synthetic construct
  REGION 1..709: note = Description of sequence: Mutant, Named: NtHAP1b mutant
MEQGFGSDSVPPAGSIDKSKVLDVKPMRCLMPVFPSPNGMSSVSTPQPSPFVCVPPSGPFPTGVSPFYPFLAPNAAARSGENHEAFGFGTPISPVPLNSFRTPTANGDTGPRRPGRPRATNGLVAEDDGVSDSQNQSDQFGSGYSVHVNDVEDTSTGKKRGRPRKTRMSHPANSHVEVDVDPILNQLLASFKLVEFDQAKKADGDKELVGRILLAFDVFRRRLTQIDEKRGETPGSARRPDLKAANLLMTKGARTNQTKRVGNVPGIEVGDIFFFRMELCLVGLHAPSMAGIDYMSVRLTGDEEPIAVSIVASGGYDDEGDDGDVLIYTGQGGVQRRDGQMFDQKLERGNLALEKSMHRGNEVRVIRGVIDVTNPRGKIYMYDGLYRIQESWAEKSKLGDCSIFRYKLLRVPGQPEAFTLWKSIQQWRDGTATRVGVILPDLTSGAESQPVCLVNDVDDEKGPAYFTYIPSLKYSKPYMKPNPSMGCQCVGGCQPGGSACPCIQKNGGFLPFSSLGVLVSYKTLIHECGSACSCPPNCRNRMSQTGPKARVEVFKTKNRGWGLRSWDPIRGGGFMCEYAGEVVEESRVGELGNDGDDDYIFDATRMYEPLEPVRDYNDESKKVPYPLVISAKKGGNVARFMNHSCSPNVFWQLVVRENNNETYYHIAFFAIRHIPPMQELTFDYGMVPPEVTFTSCHGLMKEMEFTGHH

SEQ ID NO: 521 - protein, 694 aa, synthetic construct
  REGION 1..694: note = Description of sequence: Mutant, Named: NtHAP1b mutant
MEQGFGSDSVPPAGSIDKSKVLDVKPMRCLMPVFPSPNGMSSVSTPQPSPFVCVPPSGPFPTGVSPFYPFLAPNAAARSGENHEAFGFGTPISPVPLNSFRTPTANGDTGPRRPGRPRATNGLVAEDDGVSDSQNQSDQFGSGYSVHVNDVEDTSTGKKRGRPRKTRMSHPANSHVEVDVDPILNQLLASFKLVEFDQAKKADGDKELVGRILLAFDVFRRRLTQIDEKRGETPGSARRPDLKAANLLMTKGARTNQTKRVGNVPGIEVGDIFFFRMELCLVGLHAPSMAGIDYMSVRLTGDEEPIAVSIVASGGYDDEGDDGDVLIYTGQGGVQRRDGQMFDQKLERGNLALEKSMHRGNEVRVIRGVIDVTNPRGKIYMYDGLYRIQESWAEKSKLGDCSIFRYKLLRVPGQPEAFTLWKSIQQWRDGTATRVGVILPDLTSGAESQPVCLVNDVDDEKGPAYFTYIPSLKYSKPYMKPNPSMGCQCVGGCQPGGSACPCIQKNGGFLPFSSLGVLVSYKTLIHECGSACSCPPNCRNRMSQTGPKARVEVFKTKNRGWGLRSWDPIRGGGFMCEYAGEVVEESRVGELGNDGDDDYIFDATRMYEPLEPVRDYNDESKKVPYPLVISAKKGGNVARFMNHSCSPNVFWQLVVRENNNETYYHIAFFAIRHIPPMQELTFDYGMVPPDKADM

SEQ ID NO: 522 - protein, 701 aa, synthetic construct
  REGION 1..701: note = Description of sequence: Mutant, Named: NtHAP1b mutant
MEQGFGSDSVPPAGSIDKSKVLDVKPMRCLMPVFPSPNGMSSVSTPQPSPFVCVPPSGPFPTGVSPFYPFLAPNAAARSGENHEAFGFGTPISPVPLNSFRTPTANGDTGPRRPGRPRATNGLVAEDDGVSDSQNQSDQFGSGYSVHVNDVEDTSTGKKRGRPRKTRMSHPANSHVEVDVDPILNQLLASFKLVEFDQAKKADGDKELVGRILLAFDVFRRRLTQIDEKRGETPGSARRPDLKAANLLMTKGARTNQTKRVGNVPGIEVGDIFFFRMELCLVGLHAPSMAGIDYMSVRLTGDEEPIAVSIVASGGYDDEGDDGDVLIYTGQGGVQRRDGQMFDQKLERGNLALEKSMHRGNEVRVIRGVIDVTNPRGKIYMYDGLYRIQESWAEKSKLGDCSIFRYKLLRVPGQPEAFTLWKSIQQWRDGTATRVGVILPDLTSGAESQPVCLVNDVDDEKGPAYFTYIPSLKYSKPYMKPNPSMGCQCVGGCQPGGSACPCIQKNGGFLPFSSLGVLVSYKTLIHECGSACSCPPNCRNRMSQTGPKARVEVFKTKNRGWGLRSWDPIRGGGFMCEYAGEVVEESRVGELGNDGDDDYIFDATRMYEPLEPVRDYNDESKKVPYPLVISAKKGGNVARFMNHSCSPNVFWQLVVRENNNETYYHIAFFAIRHIPPMQELTFDYGMVPPDNVGGRSACVGH

SEQ ID NO: 523 - protein, 703 aa, synthetic construct
  REGION 1..703: note = Description of sequence: Mutant, Named: NtHAP1b mutant
MEQGFGSDSVPPAGSIDKSKVLDVKPMRCLMPVFPSPNGMSSVSTPQPSPFVCVPPSGPFPTGVSPFYPFLAPNAAARSGENHEAFGFGTPISPVPLNSFRTPTANGDTGPRRPGRPRATNGLVAEDDGVSDSQNQSDQFGSGYSVHVNDVEDTSTGKKRGRPRKTRMSHPANSHVEVDVDPILNQLLASFKLVEFDQAKKADGDKELVGRILLAFDVFRRRLTQIDEKRGETPGSARRPDLKAANLLMTKGARTNQTKRVGNVPGIEVGDIFFFRMELCLVGLHAPSMAGIDYMSVRLTGDEEPIAVSIVASGGYDDEGDDGDVLIYTGQGGVQRRDGQMFDQKLERGNLALEKSMHRGNEVRVIRGVIDVTNPRGKIYMYDGLYRIQESWAEKSKLGDCSIFRYKLLRVPGQPEAFTLWKSIQQWRDGTATRVGVILPDLTSGAESQPVCLVNDVDDEKGPAYFTYIPSLKYSKPYMKPNPSMGCQCVGGCQPGGSACPCIQKNGGFLPFSSLGVLVSYKTLIHECGSACSCPPNCRNRMSQTGPKARVEVFKTKNRGWGLRSWDPIRGGGFMCEYAGEVVEESRVGELGNDGDDDYIFDATRMYEPLEPVRDYNDESKKVPYPLVISAKKGGNVARFMNHSCSPNVFWQLVVRENNNETYYHIAFFAIRHIPPMQELTFDYGMVPPDKADVGGRSACVGH

SEQ ID NO: 524 - protein, 702 aa, synthetic construct
  REGION 1..702: note = Description of sequence: Mutant, Named: NtHAP1b mutant
MEQGFGSDSVPPAGSIDKSKVLDVKPMRCLMPVFPSPNGMSSVSTPQPSPFVCVPPSGPFPTGVSPFYPFLAPNAAARSGENHEAFGFGTPISPVPLNSFRTPTANGDTGPRRPGRPRATNGLVAEDDGVSDSQNQSDQFGSGYSVHVNDVEDTSTGKKRGRPRKTRMSHPANSHVEVDVDPILNQLLASFKLVEFDQAKKADGDKELVGRILLAFDVFRRRLTQIDEKRGETPGSARRPDLKAANLLMTKGARTNQTKRVGNVPGIEVGDIFFFRMELCLVGLHAPSMAGIDYMSVRLTGDEEPIAVSIVASGGYDDEGDDGDVLIYTGQGGVQRRDGQMFDQKLERGNLALEKSMHRGNEVRVIRGVIDVTNPRGKIYMYDGLYRIQESWAEKSKLGDCSIFRYKLLRVPGQPEAFTLWKSIQQWRDGTATRVGVILPDLTSGAESQPVCLVNDVDDEKGPAYFTYIPSLKYSKPYMKPNPSMGCQCVGGCQPGGSACPCIQKNGGFLPFSSLGVLVSYKTLIHECGSACSCPPNCRNRMSQTGPKARVEVFKTKNRGWGLRSWDPIRGGGFMCEYAGEVVEESRVGELGNDGDDDYIFDATRMYEPLEPVRDYNDESKKVPYPLVISAKKGGNVARFMNHSCSPNVFWQLVVRENNNETYYHIAFFAIRHIPPMQELTFDYGMVPPDKAVGGRSACVGH

SEQ ID NO: 525 - protein, 703 aa, synthetic construct; identical to SEQ ID NO: 523
  REGION 1..703: note = Description of sequence: Mutant, Named: NtHAP1b mutant

SEQ ID NO: 526 - protein, 694 aa, synthetic construct
  REGION 1..694: note = Description of sequence: Mutant, Named: NtHAP1b mutant
MEQGFGSDSVPPAGSIDKSKVLDVKPMRCLMPVFPSPNGMSSVSTPQPSPFVCVPPSGPFPTGVSPFYPFLAPNAAARSGENHEAFGFGTPISPVPLNSFRTPTANGDTGPRRPGRPRATNGLVAEDDGVSDSQNQSDQFGSGYSVHVNDVEDTSTGKKRGRPRKTRMSHPANSHVEVDVDPILNQLLASFKLVEFDQAKKADGDKELVGRILLAFDVFRRRLTQIDEKRGETPGSARRPDLKAANLLMTKGARTNQTKRVGNVPGIEVGDIFFFRMELCLVGLHAPSMAGIDYMSVRLTGDEEPIAVSIVASGGYDDEGDDGDVLIYTGQGGVQRRDGQMFDQKLERGNLALEKSMHRGNEVRVIRGVIDVTNPRGKIYMYDGLYRIQESWAEKSKLGDCSIFRYKLLRVPGQPEAFTLWKSIQQWRDGTATRVGVILPDLTSGAESQPVCLVNDVDDEKGPAYFTYIPSLKYSKPYMKPNPSMGCQCVGGCQPGGSACPCIQKNGGFLPFSSLGVLVSYKTLIHECGSACSCPPNCRNRMSQTGPKARVEVFKTKNRGWGLRSWDPIRGGGFMCEYAGEVVEESRVGELGNDGDDDYIFDATRMYEPLEPVRDYNDESKKVPYPLVISAKKGGNVARFMNHSCSPNVFWQLVVRENNNETYYHIAFFAIRHIPPMQELTFDYGMVPPDKADL

SEQ ID NO: 527 - protein, 639 aa, synthetic construct; identical to SEQ ID NO: 437
  REGION 1..639: note = Description of sequence: Mutant, Named: NtHAP2 mutant

SEQ ID NO: 528 - protein, 21 aa, synthetic construct
  REGION 1..21: note = Description of sequence: Mutant, Named: NtHAP2 mutant
MEQGLRWVIILRASIRLGFWM

SEQ ID NO: 529 - protein, 639 aa, synthetic construct; identical to SEQ ID NO: 437
  REGION 1..639: note = Description of sequence: Mutant, Named: NtHAP2 mutant

SEQ ID NO: 530 - protein, 635 aa, synthetic construct
  REGION 1..635: note = Description of sequence: Mutant, Named: NtHAP2 mutant
MEQGLRSEGNNPPSIDKTRVLDVKPLRCLAPVFPSPNGMSSVSTPQPSPFVCVPPTGPFPPGVAPFYPFVAPNESGRPGESSQQTPSGVPNQGGPFGFAQPISPVPLNSFRTPTTANGNSGRSRRAVDDDDYSNSQDQNDQFASGFSVHVNNVEDSGTGKKRGRPKKPRRAQQAEGSTPLEVDVEPLLTQLLTSFKLVDFDQVKKADGDKELVGRVLLVFDLFRRRMTQIDESRDGSGSGRRPDLKASNMLMTKGVRTNQTKRIGNAPGIEVGDIFFFRMELCLVGLHAPTMAGIDYMSVKLTMDEEPLAVSIVSSGGYDDDGGDGDVLIYTGQGGVQRKDGQVFDQKLERGNLALEKSVHRANEVRVIRGVKDVAYPTGKIYIYDGLYKIQESWAEKNKVGCNVFKYKLLRVPGQPEAFKVWKSIQQWKDGVASRVGVILPDLTSGAESQPVCLVNDVDDEKGPAYFTYIPSLKYSKPFVMPRPSPSCHCVGGCQPGDSNCACIQSNGGFLPYSSLGVLLSYKALIHECGSACSCPPNCRNRMSQGGPKARLEVFKTKNRGWGLRSWDPIRGGGFICEYAGEVIDAGNYSDDNYIFDATRIYAPLEAERDYNDESRKVPFPLVVPRMVEIFLAL

SEQ ID NO: 531 - protein, 7 aa, synthetic construct
  REGION 1..7: note = Description of sequence: Mutant, Named: NtHAP2 mutant
MEQGLRS

SEQ ID NO: 532 - protein, 639 aa, synthetic construct; identical to SEQ ID NO: 437
  REGION 1..639: note = Description of sequence: Mutant, Named: NtHAP2 mutant

SEQ ID NO: 533 - protein, 639 aa, synthetic construct; identical to SEQ ID NO: 437
  REGION 1..639: note = Description of sequence: Mutant, Named: NtHAP2 mutant

SEQ ID NO: 534 - DNA, 1958 bp, synthetic construct
  misc_feature 1..1958: note = Description of sequence: Deletion fragment, Named: NtHAP2 deletion fragment
  source 1..1958: mol_type = other DNA
tgcgttctgagggtaataatcctccgagcatcgataagactagggttttggatgtgaagcctttgagatgtcttgcacctgtttttccatccccaaatggaatgtcttctgtttcaactccacagccatcaccttttgtctgtgttcctcccactggtccgttcccccctggggttgctccattttacccctttgtggctccaaatgagtcgggaaggccaggtgaaagtagtcaacaaactccaagtggggtgccgaatcagggcggcccttttggttttgcgcagcctatatctcccgttcctttaaactcattcagaactccaacaactgcgaatggaaatagtgggaggtccaggagggctgtagacgatgatgattacagtaattcacaggatcagaatgaccaatttgccagtggatttagtgtgcacgtgaataatgttgaagattccggtactggaaaaaaaaggggaagaccgaaaaagcctcggagagctcagcaggctgaggggtcaacccctttggaagtggatgttgaacctttgttgactcagttgctcacgtcttttaaacttgttgacttcgatcaggtcaagaaagctgatggtgacaaggagctagtggggagggtactgttggtttttgacttgttcagaagaaggatgacccaaattgacgaatcgagggatgggtcaggttctggtagaagaccagacctaaaagcttctaatatgctgatgacaaagggagttcggacaaaccaaacaaagaggattggaaatgcacccgggattgaagttggtgacatcttcttcttcaggatggaattgtgcctagtgggattgcatgcgccaactatggctgggatagattatatgagtgtcaaactaacaatggacgaagaacctcttgcggtcagcatagtgtcctctggaggatatgatgatgatggaggtgatggcgatgtattaatttacactggccagggtggagtccagaggaaagacgggcaagtgtttgatcagaaacttgagaggggaaaccttgctctggaaaagagtgtgcatcgagccaatgaagtaagagtaattaggggtgttaaggatgtcgcatatccaaccgggaagatttatatttacgacggactttataagattcaggaatcatgggcagagaaaaacaaggtgggctgcaatgtattcaagtacaaacttctgagagtccctgggcagcccgaagcatttaaagtatggaagtcaattcagcaatggaaagatggcgtggcatcacgtgttggagtcatcctaccggacctgacgtctggtgcagaaagtcaaccagtttgtcttgttaatgatgtagatgacgagaaaggacctgcctatttcacatatattcctagtttgaagtactcaaaaccttttgtaatgcctagaccctctccgagttgtcactgcgttggcgggtgccaacctggtgactccaattgcgcttgtattcagagtaatggtggctttttgccttatagttcacttggagttcttttgagttacaaagccttgatacatgagtgtggttcggcctgttcatgccctcctaattgccgaaatcgaatgtctcaaggaggtcctaaagctcgtttggaggtcttcaagacaaaaaatagaggttggggactcagatcttgggatcctatacgtggaggtggtttcatttgtgaatatgctggagaagtcatagacgctggtaattacagtgacgacaattacatttttgatgcaacccgtatatatgcgccattggaagccgagcgtgattataatgacgagtctcggaaagtcccttttcccctggtcataagtgccaagaatggtggaaatatttctcgctttatgaaccatagttgtaacccattcctttcgccattagacacattcctcccatgcaagagttga

SEQ ID NO: 535 - DNA, 3922 bp, synthetic construct
  misc_feature 1..3922: note = Description of sequence: Deletion fragment, Named: NtHAP2 deletion fragment
  source 1..3922: mol_type = other DNA
atggaacaaggtttgcgttctgagggtaataatcctccgagcatcgataagactagggttttggatgtgaagcctttgagatgtcttgcacctgtttttccatccccaaatggaatgtcttctgtttcaactccacagccatcaccttttgtctgtgttcctcccactggtccgttcccccctggggttgctccattttacccctttgtggctccaaatgagtcgggaaggccaggtgaaagtagtcaacaaactccaagtggggtgccgaatcagggcggcccttttggttttgcgcagcctatatctcccgttcctttaaactcattcagaactccaacaactgcgaatggaaatagtgggaggtccaggagggctgtagacgatgatgattacagtaattcacaggatcagaatgaccaatttgccagtggatttagtgtgcacgtgaataatgttgaagattccggtactggaaaaaaaaggggaagaccgaaaaagcctcggagagctcagcaggctgaggggtcaacccctttggaagtggatgttgaacctttgttgactcagttgctcacgtcttttaaacttgttgacttcgatcaggtcaagaaagctgatggtgacaaggagctagtggggagggtactgttggtttttgacttgttcagaagaaggatgacccaaattgacgaatcgagggatgggtcaggttctggtagaagaccagacctaaaagcttctaatatgctgatgacaaagggagttcggacaaaccaaacaaagaggattggaaatgcacccgggattgaagttggtgacatcttcttcttcaggatggaattgtgcctagtgggattgcatgcgccaactatggctgggatagattatatgagtgtcaaactaacaatggacgaagaacctcttgcggtcagcatagtgtcctctggaggatatgatgatgatggaggtgatggcgatgtattaatttacactggccagggtggagtccagaggaaagacgggcaagtgtttgatcagaaacttgagaggggaaaccttgctctggaaaagagtgtgcatcgagccaatgaagtaagagtaattaggggtgttaaggatgtcgcatatccaaccgggaagatttatatttacgacggactttataagattcaggaatcatgggcagagaaaaacaaggtgggctgcaatgtattcaagtacaaacttctgagagtccctgggcagcccgaagcatttaaagtatggaagtcaattcagcaatggaaagatggcgtggcatcacgtgttggagtcatcctaccggacctgacgtctggtgcagaaagtcaaccagtttgtcttgttaatgatgtagatgacgagaaaggacctgcctatttcacatatattcctagtttgaagtactcaaaaccttttgtaatgcctagaccctctccgagttgtcactgcgttggcgggtgccaacctggtgactccaattgcgcttgtattcagagtaatggtggctttttgccttatagttcacttggagttcttttgagttacaaagccttgatacatgagtgtggttcggcctgttcatgccctcctaattgccgaaatcgaatgtctcaaggaggtcctaaagctcgtttggaggtcttcaagacaaaaaatagaggttggggactcagatcttgggatcctatacgtggaggtggtttcatttgtgaatatgctggagaagtcatagacgctggtaattacagtgacgacaattacatttttgatgcaacccgtatatatgcgccattggaagccgagcgtgattataatgacgagtctcggaaagtcccttttcccctggtcataagtgccaagaatggtggaaatatttctcgctttatgaaccatagttgtaacccattcctttcgccattagacacattcctcccatgcaagagttgatgcgggtaataatcctccgagcatcgataagactagggttttggatgtgaagcctttgagatgtcttgcacctgtttttccatccccaaatggaatgtcttctgtttcaactccacagccatcaccttttgtctgtgttcctcccactggtccgttcccccctggggttgctccattttacccctttgtggctccaaatgagtcgggaaggccaggtgaaagtagtcaacaaactccaagtggggtgccgaatcagggcggcccttttggttttgcgcagcctatatctcccgttcctttaaactcattcagaactccaacaactgcgaatggaaatagtgggaggtccaggagggctgtagacgatgatgattacagtaattcacaggatcagaatgaccaatttgccagtggatttagtgtgcacgtgaataatgttgaagattccggtactggaaaaaaaaggggaagaccgaaaaagcctcggagagctcagcaggctgaggggtcaacccctttggaagtggatgttgaacctttgttgactcagttgctcacgtcttttaaacttgttgacttcgatcaggtcaagaaagctgatggtgacaaggagctagtggggagggtactgttggtttttgacttgttcagaagaaggatgacccaaattgacgaatcgagggatgggtcaggttctggtagaagaccagacctaaaagcttctaatatgctgatgacaaagggagttcggacaaaccaaacaaagaggattggaaatgcacccgggattgaagttggtgacatcttcttcttcaggatggaattgtgcctagtgggattgcatgcgccaactatggctgggatagattatatgagtgtcaaactaacaatggacgaagaacctcttgcggtcagcatagtgtcctctggaggatatgatgatgatggaggtgatggcgatgtattaatttacactggccagggtggagtccagaggaaagacgggcaagtgtttgatcagaaacttgagaggggaaaccttgctctggaaaagagtgtgcatcgagccaatgaagtaagagtaattaggggtgttaaggatgtcgcatatccaaccgggaagatttatatttacgacggactttataagattcaggaatcatgggcagagaaaaacaaggtgggctgcaatgtattcaagtacaaacttctgagagtccctgggcagcccgaagcatttaaagtatggaagtcaattcagcaatggaaagatggcgtggcatcacgtgttggagtcatcctaccggacctgacgtctggtgcagaaagtcaaccagtttgtcttgttaatgatgtagatgacgagaaaggacctgcctatttcacatatattcctagtttgaagtactcaaaaccttttgtaatgcctagaccctctccgagttgtcactgcgttggcgggtgccaacctggtgactccaattgcgcttgtattcagagtaatggtggctttttgccttatagttcacttggagttcttttgagttacaaagccttgatacatgagtgtggttcggcctgttcatgccctcctaattgccgaaatcgaatgtctcaaggaggtcctaaagctcgtttggaggtcttcaagacaaaaaatagaggttggggactcagatcttgggatcctatacgtggaggtggtttcatttgtgaatatgctggagaagtcatagacgctggtaattacagtgacgacaattacatttttgatgcaacccgtatatatgcgccattggaagccgagcgtgattataatgacgagtctcggaaagtcccttttcccctggtcataagtgccaagaatggtggaaatatttctcgctttatgaaccatagttgtaacccattcctttcgccattagacacattcctcccatgcaagagttga

SEQ ID NO: 536 - DNA, 371 bp, synthetic construct
  misc_feature 1..371: note = Description of sequence: Deletion fragment, Named: NtHAP1a deletion fragment
  source 1..371: mol_type = other DNA
atggatcaaggctttggttcagactctgttccaccagcagggtccattgacaagtctaaggttttagatgttaagcctatgagatgtcttatgcctgtttttccatccccaaatggaatgtcatctgtttcaactcctcaaccctcaccttttgtgtgtgttcctccaagtggtcctttcccacctggggtttctccgttttatccatttttggccccaaatggatccggaagatcaggtgaaaatcaggaatcttttggttttgggacgcctatatctccagttcctttaaattcattcagaactccaactgcgaatggaggaagaagtgcttgtgtgggtcattgaactgcagaggttacttttactag

SEQ ID NO: 537 - DNA, 2666 bp, synthetic construct
  misc_feature 1..2666: note = Description of sequence: Oligionucleotide, Named: NtHAP3
  source 1..2666: mol_type = other DNA
  variation 2635: note = n is a, c, g, or t
caaatctcttcctctcccaatctcagacttctctctaatttttgaggaaattttctttaatatatttgaagagtttgcagctttggagatttggtcaatgattgaaaaggggatttgaagttgtaaactttgagttaaagttggttgattttgataatggaacaaggtttgcgttctgatggtaataatcctccgagcatcgataagactagggttttggatgtgaagcctttgagatgtcttgcacctgtttttccatccccaaatggaatgtcttctgtttcaactccacagccctcaccttttgtctgtgttcctcccactggtccgttcccacccggggttgctccattttacccttttgtggctccaaatgattcgggaaggccaggtgaaagtagtcaacaaactccaagtggggtgccgaatcagggcggcccttttggttttgcgcagcctatatctcccgttcctttaaactcgttcagaactccaacaactgcgaatggaaatagtgggaggtcaaggagggctgtagacgatgatgattacagtaattcacaggatcagaatgaccaatttgccagtggatttagtgtgcacgtgaataatgttgaagattcaggtactggaaaaaaaaggggaagaccgaaaaagcctcggagagctcagcaggctgaggggttgacccctgtggaagtggatgttgaacctttgttgactcagttgctcacgtcttttaaacttgttgacttggatcaggtcaagaaagctgatggtgacaaggagctagcggggagggtactgttggtttttgatttgttcagaagaaggatgactcaaattgacgaatcgagggatgggcccggttctggtagaagaccagacctaaaagcttctaatatgctgatgacaaagggagttcggacaaaccaaacaaagaggattggaaatgcacccgggattgaagttggtgacatcttcttcttcaggatggaattgtgcctagtgggattgcatgcaccaactatggctggcatagattatatgagtgtcaaactaacaatggacgaagaacctcttgcggtcagcatagtgtcctctggaggatatgatgatgatggaggtgatggcgatgtattaatttacactggccagggtggagtccagaggaaagacgggcaagtgtttgatcagaaacttgagaggggaaaccttgctttggaaaagagtgtgcatcgagccaatgaagtaagagtaattaggggtgttaaggatgtcgcatatccaacggggaagatctatatttacgacggactttataagattcaggaatcatgggcagagaaaaacaaggtgggctgcaatgtatttaagtataaacttctgagagtccctgggcagcctgaagcatttaaagtatggaagtcaattcagcaatggaaagatggcgtggcatcacgtgttggagtcatcctaccggacctgacgtctggtgcagaaagtcaacccgtttgtcttgttaatgatgtagatgacgagaaaggacctgcctatttcacatatattcctagtttgaagtactcaaaaccttttgtaatgcctagaccctctccgagttgtcactgcgttggtgggtgccaacctggtgactccaattgcgcttgtattcagagtaatggaggctttttgccttatagttcacttggagttcttttgagttacaaaaccttgatacatgagtgtggttcggcctgttcatgccctcctaattgccgaaatcgaatgtctcaaggaggtcctaaagctcgtttggaggtcttcaagacgaaaaatagaggttggggactcagatcttgggatcctatacgtggaggtggtttcatttgtgaatatgctggagaagtcatagacgctggtaattacagtgacgacaattacatatttgatgcaacccgtatatatgcgcctttggaagccgaacgtgattataatgatgagtctcggaaagtcccttttcccctggtcataagtgccaagaatggtggaaatatttctcgctttatgaaccatagttgttcacctaatgtttactggcagcttgttgtacgacaaagtaacaatgaagcaacctaccatatcgcctttttcgccattagacacattcctcccatgcaagagttgacctttgattatggtatggacaaagcagatcataggagaaagaagtgcttatgtggctcgttgaactgtagaggttatttttactagtcttcaaggtctgatgacgcaaagggagtttcctagtcacaaatccattggatcagatgatcataggttgaagataaacaaggcgtgcagcacctacttttgaatggatggcgttgaaactgtagatttatcgcatcactgggagaaaagtccttggtgtttgtagttgtaacttatcagcttgctaaagctttgtaactttttgtagctttgctgtgttaaacttaatgtttgtaatttctagtcagcttgttggtgatgcataggtctttgctcatcataatttccctatttcttttttgccgttagagttgaactatttctctgtgaaattctttactaagacgtagttattttattgtgnaaaaaaaaaaaaaaaaaaaaaaaaaaaaaaa

SEQ ID NO: 538 - protein, 704 aa, synthetic construct
  REGION 1..704: note = Description of sequence: Peptide, Named: NtHAP3
MEQGLRSDGNNPPSIDKTRVLDVKPLRCLAPVFPSPNGMSSVSTPQPSPFVCVPPTGPFPPGVAPFYPFVAPNDSGRPGESSQQTPSGVPNQGGPFGFAQPISPVPLNSFRTPTTANGNSGRSRRAVDDDDYSNSQDQNDQFASGFSVHVNNVEDSGTGKKRGRPKKPRRAQQAEGLTPVEVDVEPLLTQLLTSFKLVDLDQVKKADGDKELAGRVLLVFDLFRRRMTQIDESRDGPGSGRRPDLKASNMLMTKGVRTNQTKRIGNAPGIEVGDIFFFRMELCLVGLHAPTMAGIDYMSVKLTMDEEPLAVSIVSSGGYDDDGGDGDVLIYTGQGGVQRKDGQVFDQKLERGNLALEKSVHRANEVRVIRGVKDVAYPTGKIYIYDGLYKIQESWAEKNKVGCNVFKYKLLRVPGQPEAFKVWKSIQQWKDGVASRVGVILPDLTSGAESQPVCLVNDVDDEKGPAYFTYIPSLKYSKPFVMPRPSPSCHCVGGCQPGDSNCACIQSNGGFLPYSSLGVLLSYKTLIHECGSACSCPPNCRNRMSQGGPKARLEVFKTKNRGWGLRSWDPIRGGGFICEYAGEVIDAGNYSDDNYIFDATRIYAPLEAERDYNDESRKVPFPLVISAKNGGNISRFMNHSCSPNVYWQLVVRQSNNEATYHIAFFAIRHIPPMQELTFDYGMDKADHRRKKCLCGSLNCRGYFY

SEQ ID NO: 539 - protein, 704 aa, Nicotiana attenuata
  REGION 1..704: note = Description of sequence: Nicotiana attenuata peptide
MEQGLRSDGNNPPSIDKTRVLDVKPLRCLAPVFPSPNGMSSVSTPQPSPFVCVPPTGPFPPGVAPFYPFVAPNESGRPGESSQQTPSGVPNQGGPFGFAQPISPVPLNSFRTPTTANGNSGRSRRAVDDDDYSNSQDQNDQFASGFSVHVNNVEDSGTGKKRGRPKKPRRAQQAEGSAPVEVDVEPLLTQLLTSFKLVDLDQVKKADGDKELVGRILLVFDLFRRRMTQIDESRDGSGSGRRPDLKASNMLMTKGVRTNQTKRIGNAPGIEVGDIFFFRMELCLVGLHAPTMAGIDYMSVKLTMDEEPLAVSIVSSGGYDDDGGDGDVLIYTGQGGVQRKDGQVFDQKLERGNLALEKSVHRANEVRVIRGVKDVAYPTGKIYIYDGLYKIQESWAEKNKVGCNVFKYKLLRVPGQPEAFKVWKSIQQWRDGVASRVGVILPDLTSGAESQPVCLVNDVDDEKGPAYFTYIPSLKYSKPYVMPRPSPSCHCVGGCQPGDSNCACIQSNGGFLPYSSLGVLLSYKTLIHECGSACSCPPNCRNRMSQGGPKARLEVFKTKNRGWGLRSWDPIRGGGFICEYAGEVIGAGNYSDDNYIFDATRIYAPLEAERDYNDESRKVPFPLVISAKNGGNISRFMNHSCSPNVYWQLVVRQSNNEATYHIAFFAIRHIPPMQELTFDYGMDKADHRRKKCLCGSLNCRGYFY

SEQ ID NO: 540 - protein, 710 aa, Nicotiana attenuata
  REGION 1..710: note = Description of sequence: Nicotiana attenuata peptide
MEQGFGSDFVPPAGSIDKSKVLDVKPMRCLMPIFPSPNGMSSVSTPQPSPFVCVPPSGPFPPGVSPFYPFLTPNGSGRSGENQEAFGFGTPISPVPLNSFRTPTANGDTGPRRPGRPRATNGLVAEDDGVSDSQNQSDQFGSGYSVHVNDVEDTSTRKKRGRPRKTRMSHPANSHVEVDVDPILNQLLASFKLVDVDQVKKADGDKELVGRILLAYDVFRRRLTQIDEKRGETPGSARRPDLKAANLLMTRGARTNQTKRIGNVPGIEVGDIFFFRMELCLVGLHAPSMAGIDYMSVRLTGDEEPVAVSIVASGGYDDEGDDGDVLIYTGQGGVQRRDGQMFDQKLERGNLALEKSMHRGNEVRVIRGVIDVTNPRGKIYMYDGLYRIQESWAEKSKLGDCSIFRYKLLRVPGQPEAFTLWKSIQQWRDGTATRVGVILPDLTSGAESQPVCLVNDVDDEKGPAYFTYIPSLKYSKPYMKPNPSMGCQCVGGCQPGGSTCPCIQKNGGFLPFSSLGVLVSYKTLIHECGSACSCPPNCRSRMSQAGPKARVEVFKTKNRGWGLRSWDPIHGGGFICEYAGEVVEEARVGELGNEGDDYIFDATRIYEPLEPVRDYNDESKKVPYSLVISAKKGGNVARFMNHSCSPNVFWQPVVRENNNETYYHIAFFAIRHIPPMQELNFDYGMVPPDKADRRRKKCLCGSLNCRGYFY

SEQ ID NO: 541 - protein, 704 aa, Nicotiana sp.
  REGION 1..704: note = Description of sequence: Nicotiana benthamiana peptide
MEQGLRSDVNNPPSIDKTRVLDVKPLRCLAPVFPSPNGMSSVSTPQPSPFVCVPPTGPFPPGVAPFYPFVAPNGSGRPGESSQQTPSGVPNQGGPFGFAQPISPVPLNSFRTPTTANGNSGRSRRAVDDDDYSNSQDQNDQFDSGFGVHVNIVEDSGTGKKRGRPKKTRRAQQAEGSTPVEVDVEPLLTQLLTSFKLVDLDQVKKADGDKELAGRVLLVFDLFRRRMTQIDESRDGPGSGRRPDLKASNMLMTKGVRTNQTKRIGNAPGIEVGDIFFFRMELCLVGLHAPTMAGIDYMSVKLTMDEEPLAVSIVSSGGYDDDGGDGDVLIYTGQGGVQRRDGQVFDQKLERGNLALEKSVHRANEVRVIRGVKDIAYPTGKIYIYDGLYKIQESWAEKNKVGCNVFKYKLLRVPGQPEAFKVWKSIQQWKDGVASRVGVILPDLTSGAESQPVCLVNDVDDEKGPAYFTYIPSLKYSKPFVMPRPSPSCHCVGGCQPGDSNCACIQSNGGFLPYSSLGVLLSYKALIHECGSACSCPPNCRNRMSQGGPKARLEVFKTKNRGWGLRSWDPIRGGGFICEYAGEVIDAGNYSDDNYIFDATRIYAPLEAERDYNDESRKVPFPLVISAKNGGNISRFMNHSCSPNVYWQLVVRQSNSEATYHIAFFAIRHIPPMQELTFDYGMDKADHRRKNCLCGSLNCRGYFY

SEQ ID NO: 542 - protein, 711 aa, Nicotiana sp.; identical to SEQ ID NO: 1
  REGION 1..711: note = Description of sequence: Nicotiana benthamiana peptide

SEQ ID NO: 543 - protein, 704 aa, Nicotiana sylvestris
  REGION 1..704: note = Description of sequence: Nicotiana sylvestris peptide
MEQGLRSDGNNPPSIDKTRVLDVKPLRCLAPVFPSPNGMSSVSTPQPSPFVCVPPTGPFPPGVAPFYPFVAPNDSGRPGESSQQTPSGVPNQGGPFGFAQPISPVPLNSFRTPTTANGNSGRSRRAVDDDDYSNSQDQNDQFASGFSVHVNNVEDSGTGKKRGRPKKPRRAQQAEGLTPVEVDVEPLLTLLLTSFKLVDLDQVKKADGDKELAGRVLLVFDLFRRRMTQIDESRDGPGSGRRPDLKASNMLMTKGVRTNQTKRIGNAPGIEVGDIFFFRMELCLVGLHAPTMAGIDYMSVKLTMDEEPLAVSIVSSGGYDDDGGDGDVLIYTGQGGVQRKDGQVFDQKLERGNLALEKSVHRANEVRVIRGVKDVAYPTGKIYIYDGLYKIQESWAEKNKVGCNVFKYKLLRVPGQPEAFKVWKSIQQWKDGVASRVGVILPDLTSGAESQPVCLVNDVDDEKGPAYFTYIPSLKYSKPFVMPRPSPSCHCVGGCQPGDSNCACIQSNGGFLPYSSLGVLLSYKTLIHECGSACSCPPNCRNRMSQGGPKARLEVFKTKNRGWGLRSWDPIRGGGFICEYAGEVIDAGNYSDDNYIFDATRIYAPLEAERDYNDESRKVPFPLVISAKNGGNISRFMNHSCSPNVYWQLVVRQSNNEATYHIAFFAIRHIPPMQELTFDYGMDKADHRRKKCLCGSLNCRGYFY

SEQ ID NO: 544 - protein, 704 aa, Nicotiana sylvestris; identical to SEQ ID NO: 539
  REGION 1..704: note = Description of sequence: Nicotiana sylvestris peptide

SEQ ID NO: 545 - protein, 711 aa, Nicotiana sp.; identical to SEQ ID NO: 2
  REGION 1..711: note = Description of sequence: Nicotiana tomentosiformis peptide

SEQ ID NO: 546 - protein, 704 aa, Nicotiana sp.
  REGION 1..704: note = Description of sequence: Nicotiana tomentosiformis peptide
MEQGLRSEGNNPPSIDKTRVLDVKPLRCLAPVFPSPNGMSSVSTPQPSPFVCVPPTGPFPPGVAPFYPFVAPNESGRPGESSQQTPSGVPNQGGPFGFAQPISPVPLNSFRTPTTANGNSGRSRRAVDDDDYSNSQDQNDQFASGFSVHVNNVEDSGTGKKRGRPKKPRRAQQAEGSTPLEVDVEPLLTQLLTSFKLVDFDQVKKADGDKELVGRVLLVFDLFRRRMTQIDESRDGSGSGRRPDLKASNMLMTKGVRTNQTKRIGNAPGIEVGDIFFFRMELCLVGLHAPTMAGIDYMSVKLTMDEEPLAVSIVSSGGYDDDGGDGDVLIYTGQGGVQRKDGQVFDQKLERGNLALEKSVHRANEVRVIRGVKDVAYPTGKIYIYDGLYKIQESWAEKNKVGCNVFKYKLLRVPGQPEAFKVWKSIQQWKDGVASRVGVILPDLTSGAESQPVCLVNDVDDEKGPAYFTYIPSLKYSKPFVMPRPSPSCHCVGGCQPGDSNCACIQSNGGFLPYSSLGVLLSYKALIHECGSACSCPPNCRNRMSQGGPKARLEVFKTKNRGWGLRSWDPIRGGGFICEYAGEVIDAGNYSDDNYIFDATRIYAPLEAERDYNDESRKVPFPLVISAKNGGNISRFMNHSCSPNVYWQLVVRQSNNEATYHIAFFAIRHIPPMQELTFDYGMDKADHRRKKCLCGSLNCRGYFY

SEQ ID NO: 547 - protein, 1008 aa, Anisodus acutangulus
  REGION 1..1008: note = Description of sequence: Anisodus acutangulus peptide
MEQGFGSDSVPPTGPIDKSKVLDVKPLRCLVPVFPSPNGMSSVNTPQPSPFVCVPPSGPFPPGVSPFYPFLSPNESGRSAENQEGFGFGTPISPVPLNSFRTPTANGDTGPRRPGRPRATNGVAAEDDGLSGSQNDSDQFASGYSVHTNDVEDTSTGKKRGRPRKSRLSQPASNASASPPVEVDIDPLLNQLLASFKLVEIDQVKKADGDKELAGRILLVFDLFRRRLTQFEEKRGDIPGSARRPDLKGANLLMTRGVRTNQTKRIGNVPGVEVGDIFFFRMELCLVGLHAPSMAGIDYMSGRLTGEEEPIAVSIVSSGGYDDEGDDGDVLIYTGQGGVQRRDGQMFDQKLERGNLALEKSMHRGNEVRVIRGVLDVQNGGRGKIYMYDGLYRIQESWAEKSKQGNCSIFRYKLVRVPGQPEAYTLWKSVQQWRDGTASRAGVILPDLTSGAESQPVCLVNDVDDEKGPAYFTYIPSLKYSKPFMKPINPSMGCQCLGGCQPGASCACIQKNGGYLPFNPLGVLLSYKTLIHECGSACSCPPNCRNRISQAGPKARVEVFKTKNRGWGLRSWDPIRGGGFVCEYAGEVIEESRVGEFGNDGDDDYIFDATRMYEPLEAVRDYNDESKKVPYPLVISAKKGGNVARFMNHSCSPNVFWQLVRVFLLVIQKWSSLVNTLSSRSVYDDRNKALSFLFMTSSSNPGIVPRNSRPPDLDEILNTSTASMEWVNNAAPDLKLPRTKDIFINGHSVKVKFCDTCLLYRPPRASHCSICNNCVQRFDHHCPWVGQCIGVRNYRCFILFISSTTTLCIYVFTFSLLNLLGQPGSFLHAMSTDVVSVVLICYCFIAVWFVGGLSVFHFYLMSTNQTTYENFRYRYEKKENPYSRGILKNLKEILCSKVPPSLVNFREWVIEEDDPSVRSAVSMSHKFGSINSKGKFDLEMGGILGKDGAAFQVDYGGIDESLKKGKNDNANFDSLFFPDDQDAESTHSNEQGTVEDGRTVEGSNQGSS

SEQ ID NO: 548 - protein, 1008 aa, Anisodus acutangulus
  REGION 1..1008: note = Description of sequence: Anisodus acutangulus peptide
MEQGFGSDSVPPTGPIDKSKVLDVKPLRCLVPVFPSPNGMSSVNTPQPSPFVCVPPSGPFPPGVSPFYPFLSPNESGRSAENQEGFGFGTPISPVPLNSFRTPTANGDTGPRRPGRPRATNGVAAEDDGLSGSQNDSDQFASGYSVHTNDVEDTSTGKKRGRPRKTRLSQPASNASASPPVEVDIDPLLNQLLASFKLVEIDQVKKADGDKELAGRILLVFDLFRRRLTQFEEKRGDIPGSARRPDLKGANLLMTRGVRTNQTKRIGNVPGVEVGDIFFFRMELCLVGLHAPSMAGIDYMSGRLTGEEEPIAVSIVSSGGYDDEGDDGDVLIYTGQGGVQRRDGQMFDQKLERGNLALEKSMHRGNEVRVIRGVLDVQNGGKGKIYMYDGLYRIQESWAEKSKQGNCSIFRYKLVRVPGQPEAYTLWKSVQQWRDGTASRAGVILPDLTSGAESQPVCLVNDVDDEKGPAYFTYIPSLKYSKPFMKPINPSMGCQCLGGCQPGASCACIQRNGGYLPFNPLGVLLSYKTLIHECGSACSCPPNCRNRISQAGPKVRVEVFKTKNRGWGLRSWDPIRGGGFVCEYAGEVIEESRVGEFGNDGDDDYIFDATRMYESLEAVRDYNDESKKVPYPLVISAKKGGNVARFMNHSCSPNVFWQLVRVFLLVIQKWSSLVNTLSSRSVYEDRSKALSFLFMTSSSNPGIVPRNSRPPDLDEILNTSTASMEWVNNAAPDLKLPRTKDIFINGHSVKVKFCDTCLLYRPPRASHCSICNNCVQRFDHHCPWVGQCIGVRNYRCFILFISSTTTLCIYVFTFSLLNLLGQPGSFLHAMSTDVVSVVLICYCFIAVWFVGGLSVFHFYLMSTNQTTYENFRYRYEKKENPYSRSILKNLKEILCSKVPPSLVNFREWVIEEDDLSVRSAVSMSHKFGSINSKGKFDLEMGGILGKDGAAFQVDYGGIDESLKKGKNNNAKFDSLFFPDDQDAESTHSNEQRTVEDGRTAEGSNHGSS

SEQ ID NO: 549 - protein, 1147 aa, Anisodus acutangulus
  REGION 1..1147: note = Description of sequence: Anisodus acutangulus peptide
MNPPSSIDKTRVLDVKPLRCLSPVFTSPSDMSSVSTPQPSPFVCVSPTGPFPTGVSSFFPFVAPNETTQQQIPSRVLPGRCVGADRLAVNETTSQQTPTGVGPGRSVGADGVQDSSTGRKKKKLNKPMEVVDVEPLLNQLIASFKLVDLDQVKKADGDKEVVRRILLIFDLFRRRMTQIDESRNGSGSGTRPDLIASNLMRKKEVRTNQTKRIGNVSGIEVGDIFFFRMELCLVGLHSPSMSGIDYISSKLTIDQEPLAVSIVSAGGYDDDGGGGDGDLLVYTGQGGVQRKDGKMFDQKLEGGNLALEKSLHRGNVVRVIRGVRDVANPTGKIYIYDGLYKIRESWVEKTKLDCNVFKYKLLRVPGQPEAFKVWKTIQQWKDGVASRVGVILPDLTSGAESQPVCLVNDVDDEKGPAYFTYIPSLKYSKPFLMPRPSPGCHCVGGCQPGDSNCPCIQRNGGFLPYSSLGVLMSYKTSIHECYSSCSCPPNCRNRISQGGPRVRLEVFKTKNRGWGLRSRDPIRGGSFICEYAGEVTDVGNDSGNNYIFDATHIYESLEGIPDYNDESWKVPFPLIISAKNGGNVARFMNHSCSPNVYWKLVVREKGVFTSLMTQKEFRSHISHQIRLAEVENMNKGSEHLPLNGWRQKLFDALNFRIVVSSQLGEACVLILILALADAKVELSRLLSALGEKRYDGIPEKTSGSIKEQLASIAPALEKLWKQKDDRVKEFLDVQSQIEKISSEIAGTSEQVESPKVDESGLSLKKPVSFMHSFKIFKKKRFSHILSERLHKVLEFVSTIHDLCAVLGIDFFSTVTKVHPSLNDSTGVQSKSISIDTLSSLARTVLALKEDKKQRLQKHQELATQLIDLWNLMDTTEEERSVFDHVTCNISASVDEVSIPGALALDLDLDLIEQAEVEVERLDQLKASRMKEISFKRQAELEGIYARAHIEIDTEAAREKIMALIDSGNVDSAELLADMDNQIVNAKDEAHSRKEILDKVEKWMAACEEESWLDDYNRVNIPLKMGLLMHSYVVYDSLKRAEKARILVSKIPGGAKWWYISLNRGLLIAKTRAWEQDRATTFTYDGVPLLAMLDEYMMLRHDREEEKRRLRVSALSFRRVIKTRRSSMSRFKEERNTIWINTKPSSTA

SEQ ID NO: 550 - protein, 717 aa, Anisodus tanguticus
  REGION 1..717: note = Description of sequence: Anisodus tanguticus peptide
MEQGFGSDSVPPTGPIDKSKILDVKPLRCLVPVFPSPNGMSSVNTPQPSPFVCVPPSGPFPPGVSPFYPFLSPNESGRSAENQEGFGFGTPISPVPLNSFRTPTANGDTGPRRPGRPRATNGVAAEDDGLSGSQNDSDQFASGYSVHTNDVEDTSTGKKRGRPRKTRLSQPASNASASPPVEVDIDPLLNQLLASFKLVEIDQVKKADGDKELAGRILLVFDLFRRRLTQFEEKRGDIPGSARRPDLKGANLLMTRGVRTNQTKRIGNVPGVEVGDIFFFRMELCLVGLHAPSMAGIDYMSGRLTGEEEPIAVSIVSSGGYDDEGDDGDVLIYTGQGGVQRRDGQMFDQKLERGNLALEKSMHRGNEVRVIRGVLDVQNGGKGKIYMYDGLYRIQESWAEKSKQGNCSIFRYKLVRVPGQPEAYTLWKSVQQWRDGTASRAGVILPDLTSGAESQPVCLVNDVDDEKGPAYFTYIPSLKYSKPFMKPINPSMGCQCLGGCQPGASCACIQRNGGYLPFNPLGVLLSYKTLIHECGSACSCPPNCRNRISQAGPKVRVEVFKTKNRGWGLRSWDPIRGGGFVCEYAGEVIEESRVGEFGNDGDDDYIFDATRMYEPLEAVRDYNDESKKVPYPLVISAKKGGNVARFMNHSCSPNVFWQLVVREINNETYYHVAFFAIRHIPPMQELTFDYGMVPPDKADRRRKKCLCGSLNCRGYFY

SEQ ID NO: 551 - protein, 717 aa, Anisodus tanguticus
  REGION 1..717: note = Description of sequence: Anisodus tanguticus peptide
MEQGFGSDSVPPTGPIDKSNVLDVKPLRCLVPVFPSPNGMSSVNTPQPSPFVCVPPSGPFPPGVSPFYPFLSPNESGRSAENQEGFGFGTPISPVPLNSFRTPTANGDTGPRRPGRPRATNGVAAEDDGLSGSQNDSDQFASGYSVHTNDVEDTSTGKKRGRPRKSRLSQPASNASASPPVEVDIDPLLNQLLASFKLVEIDQVKKADGDKELAGRILLVFDLFRRRLTQFEEKRGDIPGSARRPDLKGANLLMTRGVRTNQTKRIGNVPGVEVGDIFFFRMELCLVGLHAPSMAGIDYMSGRLTGEEEPIAVSIVSSGGYDDEGDDGDVLIYTGQGGVQRRDGQMFDQKLERGNLALEKSMHRGNEVRVIRGVLDVQNGGRGKIYMYDGLYRIQESWAEKSKQGNCSIFRYKLVRVPGQPEVYTLWKSVQQWRDGTASRAGVILPDLTSGAESQPVCLVNDVDDEKGPAYFTYIPSLKYSKPFMKPINPSMGCQCLGGCQPGASCACIQKNGGYLPFNPLGVLLSYKTLIHECGSACSCPPNCRNRISQAGPKARVEVFKTKNRGWGLRSWDPIRGGGFVCEYAGEVIEESRVGEFGNDGDDDYIFDATRMYEPLEAVRDYNDESKKVPYPLVISAKKGGNVARFMNHSCSPNVFWQLVVRQINNETYYHVAFFAIRHIPPMQELTFDYGMVPPDKADRRRKKCLCGSLNCRGYFY

SEQ ID NO: 552 - protein, 660 aa, Anisodus tanguticus
  REGION 1..660: note = Description of sequence: Anisodus tanguticus peptide
MNPPSSIDKTRVLDVKPLRCLSPVFTSPSDMSSVSTPQPSPFVCVSPTGPFPTGVSSFFPFVAPNETTQQQIPSRVLPGRCVGADRLAVNETTSQQTPTGVRPGRSVGADGVDVNDVQDSSTGRKKKKLNKPMEVVDVEPLLNQLIASFKLVDLDQVKKADGDKEVVRRILLVFDLFRRRMTQIDESRNGSGSGTRPDLIASNLMRKKEVRTNQTKRIGNVSGIEVGDIFFFRMELCLVGLHSPSMSGIDYISSKLTIDQEPLAVSIVSAGGYDDDGGGGDGDLLVYTGQGGVQRKDGKMFDQKLEGGNLALEKSLHRGNVVRVIRGVRDVANPTGKIYIYDGLYKIRESWVEKTKLDCNVFKYKLLRVPGQPEAFKVWKTIQQWKDGVASRVGVILPDLTSGAESQPVCLVNDVDDEKGPAYFTYIPSLKYSKPFLMPRPSPGCHCVGGCQPGDSNCPCIQRNGGFLPYSSLGVLMSYKTSIHECYSACLCPPNCRNRMSQGGPRVRLEVFKTKNRGWGLRSRDPIRGGSFICEYAGEVTDVGNDSGNNYIFDATHIYESLEGIPDYNDESWKVPFPLIISAKNGGNVARFMNHSCSPNVYWKLVVRESNNEAYYHIAFFSIRHIPPMQELTYDYGIDKADHRRKQCLCGSLNCRRYFY

SEQ ID NO: 553 - protein, 708 aa, Capsicum annuum
  REGION 1..708: note = Description of sequence: Capsicum annuum peptide
MEQGGFGSDSGTPPGPIDKSKVLDVKPLRCLVPVFPTPNGMTSTNPQPSPFVCVPPSGPFPPGVSPFYPFLSPNDSGRSAENQEGFGFGTPISPVPLNSFRTPTANGDAGPRRPGRPRSAANGLATDDDDSQHSDQFGSGYSNDVEDTSTGKKRGRPRKSRLSQSDNAAAHPLEVDMDPLLNQLLASFKLAEVDQVKKADGDKELAGRILLVYDLFRRRMTQIEERRGETPGAARRPDLKGANLLMTRGARTNQTKRIGNVPGVEVGDIFFFRMELCLVGLHAPSMAGIDYMSVRLTGDEEPIAVSIVSSGGYDDEGDDGEVLIYTGQGGVQRRDGQMFDQKLERGNLALEKSVHRRNEVRVIRGVVDVQNGGRGKVYIYDGLYRVQESWAEKSKLGNCSIFRYKLLRVPGQPEAFTLWKSLQQWRDGTATRVGVILPDLTSGAESQPVCLVNDVDDEKGPAYFTYIPSLKYSKPFMKSNPSMGCQCLGGCQPGGSCSCVQKNGGYLPFNSIGVLMSYKTLVHECGSACSCPPNCRNRTTQAGPKVRVEVFKTKNRGWGLRSWDPIRGGGFVCEYAGEVIDESRVGEFGNDGDDDYIFDATRMYEPLEATRDYNDESKKAPYPLVISAKKGGNVARFMNHSCSPNVYWQLVVREINNETYYHVAFFAIRHIPPMQELTFDYGMVPPDKADRRRKKCLCGSLNCRGYFY

SEQ ID NO: 554 - protein, 708 aa, Capsicum annuum
  REGION 1..708: note = Description of sequence: Capsicum annuum peptide
MEQGGFGSDSGTPPGPIDKSKVLDVKPLRCLVPVFPTPNGMTSTNPQPSPFVCVPPSGPFPPGVSPFYPFLSPNDSGRSAENQEGFGFGTPISPVPLNSFRTPTANGDAGPRRPGRPRSAANGLATDDDDSQHSDQFGSGYSNDVEDTSTGKKRGRPRKSRLSQSDNAGAHPLEVDMDPLLNQLLASFKLAEVDQVKKADGDKELAGRILLVYDLFRRRMTQIEERRGETPGAARRPDLKGANLLMTRGARTNQTKRIGNVPGVEVGDIFFFRMELCLVGLHAPSMAGIDYMSVRLTGDEEPIAVSIVSSGGYDDEGDDGEVLIYTGQGGVQRRDGQMFDQKLERGNLALEKSVHRRNEVRVIRGVVDVQNGGRGKVYIYDGLYRVQESWAEKSKLGNCSIFRYKLLRVPGQPEAFTLWKSLQQWRDGTATRVGVILPDLTSGAESQPVCLVNDVDDEKGPAYFTYIPSLKYSKPFMKSNPSMGCQCLGGCQPGGSCSCVQKNGGYLPFNSIGVLMSYKTLVHECGSACSCPPNCRNRTTQAGPKVRVEVFKTKNRGWGLRSWDPIRGGGFVCEYAGEVIDESRVGEFGNDGDDDYIFDATRMYEPLEATRDYNDESKKAPYPLVISAKKGGNVARFMNHSCSPNVYWQLVVREINNETYYHVAFFAIRHIPPMQELTFDYGMVPPDKADRRRKKCLCGSLNCRGYFY

SEQ ID NO: 555 - protein, 632 aa, Capsicum annuum
  REGION 1..632: note = Description of sequence: Capsicum annuum peptide
GRSAENQEGFGFGTPISPVPLNSFRTPTANGDAGPRRPGRPRSAANGLATDDDDSQHSDQFGSGYSNDVEDTSTGKKRGRPRKSRLSQSDNAAAHPLEVDMDPLLNQLLASFKLAEVDQVKKADGDKELAGRILLVYDLFRRRMTQIEERRGETPGAARRPDLKGANLLMTRGARTNQTKRIGNVPGVEVGDIFFFRMELCLVGLHAPSMAGIDYMSVRLTGDEEPIAVSIVSSGGYDDEGDDGEVLIYTGQGGVQRRDGQMFDQKLERGNLALEKSVHRRNEVRVIRGVVDVQNGGRGKVYIYDGLYRVQESWAEKSKLGNCSIFRYKLLRVPGQPEAFTLWKSLQQWRDGTATRVGVILPDLTSGAESQPVCLVNDVDDEKGPAYFTYIPSLKYSKPFMKSNPSMGCQCLGGCQPGGSCSCVQKNGGYLPFNSIGVLMSYKTLVHECGSACSCPPNCRNRTTQAGPKVRVEVFKTKNRGWGLRSWDPIRGGGFVCEYAGEVIDESRVGEFGNDGDDDYIFDATRMYEPLEATRDYNDESKKAPYPLVISAKKGGNVARFMNHSCSPNVYWQLVVREINNETYYHVAFFAIRHIPPMQELTFDYGMVPPDKADRRRKKCLCGSLNCRGYFY

SEQ ID NO: 556 - protein, 671 aa, Capsicum annuum
  REGION 1..671: note = Description of sequence: Capsicum annuum peptide
MMEQSYVSNANVPNGSTIDKTRVLEVKPLRCLSPVFPSPNGMSSVSTPQPSPFVCITPNGPYPPGVTPFYPFVAQNESGRHCESSQQATNHGQNQGNFGFGTPINPAPVNSLKNATANGRNVHEGTGTGRKKGVAKKPRKSLENIVEVNVEPLLNQLLMSFRLVELDQAKRADGDKELVGRILMVFDLFRRRMTQMDEPRYGAGSGRRPDLKASKMMMTKGVRTNQMKRIGNVTGIEVGDIFFFRMELCLVGLHAPTMSGIDYMSVKLTKDEEPLAVSVVSAGGYEDDGGDGDMFIYTGQGGVQRKDGQMFDQKLEKGNLALEKSVRRANPVRVVRGVKDVANPTGKIYIYDGLYKIQESWEEKNKSGLNVFKYKFLRVPGQPEAFKLWKSIQQWRDGVTSRGGVILPDLTSGAESRPVGLVNDVDDEKGPAYFAYIPSLKYSKPFLMPRPSLGCPCLDGCQPDDSNCPCIQRNGGLLPYSSLGVLMSYKTLIHECGSACSCPPNCRNRMSQGGLKVHLEVFKTRNKGWGLRSWDPIRAGAFICEYAGEVIDAGNDIDDNYIFDATRIYEQPLEAVHDYNDESRKVPFPLVISAKNGGNVARFMNHSCSPNVYWQLVVRESNNEAYYHIAFFAIRHIPPMQELTYDYGMNKVDHRRKRCLCGSLNCRGYFY

SEQ ID NO: 557 - protein, 708 aa, Capsicum baccatum
  REGION 1..708: note = Description of sequence: Capsicum baccatum peptide
MEQGGFGSDSGTPPGPIDKSKVLDVKPLRCLVPVFPTPNGMTSTNPQPSPFVCVPPSGPFPPGVSPFYPFLSPNDSGRSAENQEGFGFGTPISPVPLNSFRTPTANGDAGPRRPGRPRSAANGLATDDDDSQHSDHFGSGYSNDVEDTSTGKKRGRPRKSRLSQSDNAAAHPLEVDMDPLLNQLLASFKLAEVDQVKKADGDKELAGRILLVYDLFRRRMTQIEERRGETPGAARRPDLKGANLLMTRGARTNQTKRIGNVPGVEVGDIFFFRMELCLVGLHAPSMAGIDYMSVRLTGDEEPIAVSIVSSGGYDDEGDDGEVLIYTGQGGVQRRDGQMFDQKLERGNLALEKSVHRRNEVRVIRGVVDVQNGGRGKVYIYDGLYRVQESWAEKSKLGNCSIFRYKLLRVPGQPEAFTLWKSLQQWRDGTATRVGVILPDLTSGAESQPVCLVNDVDDEKGPAYFTYIPSLKYSKPFMKSNPSMGCQCLGGCQPGGSCSCVQKNGGYLPFNSIGVLMSYKTLVHECGSACSCPPNCRNRTTQAGPKVRVEVFKTKNRGWGLRSWDPIRGGGFVCEYAGEVIDESRVGEFGNDGDDDYIFDATRMYEPLEATRDYNDESKKAPYPLVISAKKGGNVARFMNHSCSPNVYWQLVVREINNETYYHVAFFAIRHIPPMQELTFDYGMVPPDKADRRRKKCLCGSLNCRGYFY

SEQ ID NO: 558 - protein, 671 aa, Capsicum baccatum
  REGION 1..671: note = Description of sequence: Capsicum baccatum peptide
MMEQSYGSNANVPNGSTIDKTRVLEVKPLRCLSPVFPSPNGMSSVSTPQPSPFVCITPNGPYPPGVTPFYPFVAQNESGRHGESSQQAANRGQNQGNFGFGTPINPAPVNSLKNATANGSNVHEGTGTGRKKGVAKKPRKSLENIVEVNVEPLLNQLLMSFRLVELDQAKRADGDKELVGRILMVFDLFRRRMTQMDEPRYGAGSGRRPDLKASKMMMTKGVRTNQMKRIGNVTGIEVGDIFFFRMELCLVGLHAPTMSGIDYMSVKLTKDEEPLAVSVVSAGGYEDDGGDGDMFIYTGQGGVQRKDGQMFDQKLEKGNLALEKSVHRANLVRVVRGVKDVANPTGKIYIYDGLYKIQESWEEKNKSGLNVFKYKFLRVPGQPEAFKLWKSIQQWRDGVTSRGGVILPDLTSGAESRPVGLVNDVDDEKGPAYFTYIPSLKYSKPFLMPRPSLGCPCLDGCQPDDSNCPCIQRNGGLLPYSSLGVLMSYKTLIHECGSACSCPPNCRNRMSQGGLKVHLEVFKTRNKGWGLRSWDPIRAGAFICEYAGEVIDAGNDIDDNYIFDATRVYEQPLEAVHDYNDESRKVPFPLVISAKNGGNVARFMNHSCSPNVYWQLVVRESNNEAYYHITFFAIRHIPPMQELTYDYGMNKVDHRRKRCLCGSLNCRGYFY

SEQ ID NO: 559 - protein, 671 aa, Capsicum chinense
  REGION 1..671: note = Description of sequence: Capsicum chinense peptide
MMEQSYGSNANVPNGSTIDKTRVLEVKPLRCLSPVFPSPNGMSSVSTPQPSPFVCITPNGPYPPGVTPFYPFVAQNESGRHGESSQQAANRGQNQGNFGFGTPINPAPVNSLKNATANGRNVHEGTGTGRKKGVAKKPRKSLENIVEVNVEPLLNQLLMSFRLVELDQAKRADGDKELVGRILMVFDLFRRRMTQMDEPRYGAGSGRRPDLKASKMMMTKGVRTNQMKRIGNVMGIEVGDIFFFRMELCLVGLHAPTMSGIDYMSVKLTKDEEPLAVSVVSAGGYEDDGGDGDMFIYTGQGGVQRKDGQMFDQKLEKGNLALEKSVHRANLVRVVRGVKDVANPTGKIYIYDGLYKIQESWEEKNKSGLNVFKYKFLRVPGQPEAFKLWKSIQQWRDGVTSRGGVILPDLTSGAESRPVGLVNDVDDEKGPAYFTYIPSLKYSKPFLMPRPSLGCPCLDGCQPDDSNCPCIQRNGGLLPYSSLGVLMSYKTLIHECGSACSCPPNCRNRMSQGGLKVHLEVFKTRNKGWGLRSWDPIRAGAFICEYAGEVIDAGNDIDDNYIFDATRIYEQPLEAVHDYNDESRKVPFPLVISAKNGGNVARFMNHSCSPNVYWQLVVRESNNEAYYHIAFFAIRHIPPMQELTYDYGMNKVDHRRKRCLCGSLNCRGYFY

SEQ ID NO: 560 - protein, 708 aa, Datura stramonium
  REGION 1..708: note = Description of sequence: Datura stramonium peptide
MEQGFGSDSVPPTGPIDKSKVLDVKPLRCLIPVFPSPNGMSSVTNPQPSPFVCVPPSGPFPPGVSPFYPFLSPNESGRSAENQDAFGFGTPISPVPLNSFRTPTANGDTGPRRPGRPRAVNGLAAEDDDSQNHSEQFASGYNDVEDTSTVKKRGRPRKNRLSQPANTDSPPVEVDIDPLLNELIASFKLVEIDQVKKADGDKELAGRILLVFDLFRRRLTQIEERRGETPGSARRPDLKGANLLMTRGVRTNQTKRIGNVPGVEVGDIFFFRMELCLVGLHAPSMAGIDYMSVRLTGDEEPIAVSIVSSGGYDDEGDDGDVLIYTGQGGVQRRDGQMFDQKLERGNLALEKSMHRGNEVRVIRGVVDVQNGGRGKIYIYDGLYRIQESWAEKSKLGNCSIFRYKLLRVPGQPEAFTLWKSVQQWRDGTASRVGVILPDLTSGIESQPVCLVNDVDDEKGPAYFTYISSLKYSKPFMKPNPSIGCQCLGGCQPGGSSCPCIQKNGGYLPFNSLGVLMSYKTLVHECGSACSCPPNCRNRISQAGPKVRVEVFKTKNRGWGLRSWDPIRGGGFVCEYAGEVIEESRVGEFGNDGDDDYIFDATRMYEPLEAVRDYNDESKKVPYPLVISAKKGGNVARFMNHSCSPNVFWQLVVREINNETYYHVAFFAIRHIPPMQELTFDYGMVPPDKADRRRKKCLCGSLNCRGYFY

SEQ ID NO: 561 - protein, 712 aa, Datura stramonium
  REGION 1..712: note = Description of sequence: Datura stramonium peptide
MEQGLGSDANSPSGSTIDKTRVLDVKPLRCLEPVFPSPNGMSSVSTPQPSPFVCVPPTGPFPNGVTPFYPFVAPGESGRLGESSQQPPRGGPNQGPFGYGQPISPVPLNSFRNPTANGNSGRSTRVGRSDGADGLVIDDDGYRKSLNQNDQFASGFVVHVNDVENSRTGRKRGRPKKPRRPEQAGTHVEVDVESLLNQLLTSFKVVDLDQAKKADGDKELVGRMLLVFDLFRRRMTQIDESMDGSGSGKRPDLKASNMLTTKIVRTNQTKRIGNVPGIEVGDIFFFRMELCLVGLHAPSMAGIDYMSVKLTKDEEPLAVSIVSSGGYDDDGGDGDMLIYTGQGGVQRKDGQMFDQKLERGNLALEKSLHRANEVRVIRGVKDVANPTGKIYIFDGLYRIQESWAEKNKLGCNVFKYKLIRVPGQPEAFKVWKSIQQWKDGVASRVGVILPDLTSGAESQPVCLVNDVDDEKGPAYFTYVRSLKYSKPFLMPRPSPGCHCLGGCQPGDSNCPCIQRNGGFLPYSSLGVLLNYKTLIHECGSACSCPPNCRNRMSQGGPKVRMEVFKTKNKGWGLRSWDPIRGGGFICEYAGEVTDVSNDNDDNFIFDATRMYEPLEPVRDYNDESQKVPFPLVISAKNGGNIARFMNHSCSPNVYWQLVVRESNNEAYYHIAFFAIRHIPPMQELTYDYGMDKADHRRKKCLCGSLNCRGYFY

SEQ ID NO: 562 - protein, 715 aa, Lycium barbarum
  REGION 1..715: note = Description of sequence: Lycium barbarum peptide
MEQGFGSDSVPPTGPIDKSKVLDVKPLRCLVPVFPSPNGMSSSTTPQPSPFVCVPPSGPFPPGVSPFYPFLSPNESGRSAENQEGFGFGTPISPVPLNSFRTPTANGDTGPRRPGRPRANNNLAAEDDGLSGSQSDQFASGYSVHTNDVEDTGTGKKRGRPRKTRLSQPANNAAGSPPAEVDIDPLLNQLLASFKLVEIDQVKKADGDKELAGRILLVFDLFRRRLTQIEERKGETPGSSRRPDLKGANLLMTRGVRTNQSKRIGNVPGVEVGDIFFFRMELCLVGLHAPSMAGIDYMSVKLTGEEEPIAVSIVSSGGYDDEGDDGDVLIYTGQGGVQRRDGQMFDQKLERGNLALEKSMHRGNEVRVIRGVVDVQNGGRGKIYMYDGLYRIRESWAEKSKLGNCSIFKYKLFRVPGQPEAYTLWKSVQQWRDGTATRVGVILPDLTSGAESQPVCLVNDVDDEKGPAYFTYIPSLKYSKPFMKSNNPSIGCQCVGGCQPGGTCPCIQKNGGYLPFNSLGVLMSYKTLIHECGSACSSPLNCRNRITQAGPKARVEVFKTKNRGWGLRSWDPIRGGGFICEYAGEVIEESRVGEFGNDGDDDYIFDATRMYEPLEAVRDYNDESKKVPYPLVISAKKGGNVARFMNHSCSPNVFWQLVVREMNNETYYHVAFFAIRHIPPMQELTFDYGMVPPDKADRRRKKCLCGSLNCRGYFY

SEQ ID NO: 563 - protein, 659 aa, Lycium barbarum
  REGION 1..659: note = Description of sequence: Lycium barbarum peptide
MEQGTGSNANPLSVDKTRVLDVKPLRCLSPVFPSQSEMSSLSTPQPSPFVCVPPTGPFPSGVSPIFPFVAPNETSQQTPSGVPLNSGRSTRPGRSAGADGLAVEDDGVHVNDVGDSSTGKKKGRPKKPKRSQQAAEFPRVEVDVEPLLNQLLTSFKLVELDQVKKADGDKEVVARILLVFDLFRRRMAQIDESRDTRPDLKASNMLRTKGIRTNQTKRIGNVPGVEVGDIFFFRMELCIVGLHAPTMSGIDYVSPKLTRDEEPLAVSIVSAGGYHDDGGDGDLLVYTGQGGVQRKDGKMFDQKLEGGNLALEKSVHRANEVRVIRGVKDVANPTGKIYIYDGLYKVQESWTEKSKSECNVFKYKLVRVPGQPEAFKVWKSIQQWKDGVASRVGVILPDLTSGAERQPVCLVNDVDDEKGPAYFTYIPTLKYSKPFIMPRPSPSCHCLDGCQSGDSNCPCIQRNEGFLPYSSLGVLMSYKTLIRECFSACSCPPDCRNRISQGGPKVRLEVFKTKNRGWGLRSLDPIRGGGFICEYAGEVIDVGNDSDDNYTFDATRIYEPLEAVHDYNDESRKVPFPLIISAKNGGNIARFMNHSCSPNVYWKLVVRESNNEAYFHIAFFAIRHIPPMQELTYDYGINKADRRRKQCLCGSLNCRRYFH

SEQ ID NO: 564 - protein, 715 aa, Lycium ferocissimum
  REGION 1..715: note = Description of sequence: Lycium ferocissimum peptide
MEQGFGSDSVPPTGPIDKSKVLDVKPLRCLVPVFPSPNGMSSSTTPQPSPFVCVPPSGPFPPGVSPFYPFLSPNESGRSAENQEGFGFGTPISPVPLNSFRTPTANGDTGPRRPGRPRANNNLAAEDDGVSGSQSDQFASGYSVHTNDVEDTGTGKKRGRPRKTRLSQPANNAAGSPPVEVDIDPLLNQLLASFKLVEIDQVKKADGDKELAGRILLVFDLFRRRLTQIEERRGETPGSARRPDLKGANLLMTRGVRTNQSKRIGNVPGVEVGDIFFFRMELCLVGLHAPSMAGIDYMSVKLTGEEEPIAVSIVSSGGYDDEGDDGDVLIYTGQGGVQRRDGQMFDQKLERGNLALEKSMHRGNEVRVIRGVVDVQNGGRGKIYMYDGLYRIRESWAEKSKLGNCSIFKYKLFRVPGQPEAYTLWKSVQQWRDGTATRVGVILPDLTSGAESQPVCLVNDVDDEKGPAYFTYIPSLKYSKPLMKSNNPSIGCQCVGGCQPGGTCPCIQKNGGYLPFNSLGVLMSYKTLIHECGSACSSPPNCRNRITQAGPKARVEVFKTKNRGWGLRSWDPIRGGGFICEYAGEVIEESRVGEFGNDGDDDYIFDATRMYEPLEAVRDYNDESKKVPYPLVISAKKGGNVARFMNHSCSPNVFWQLVVREMNNETYYHVAFFAIRHIPPMQELTFDYGMVPPDKADRRRKKCLCGSLNCRGYFY

SEQ ID NO: 565 - protein, 659 aa, Lycium ferocissimum
  REGION 1..659: note = Description of sequence: Lycium ferocissimum peptide
MEQGTGSNANPLSVDKTRVLDVKPLRCLSPVFPSQSEMSSLSTPQPSPFVCVPPTGPFPSGVSPIFPFVAPNETSQQTTSGVPLNSGRSTRPGRSAGADGLAVEDDGVHVNDVEDSSTGKKKGRPKKPKRSQQAAEFPRVEVDVEPLLNQLLTSFKLVELDQVKKADGDKEVVARILLVFDLFRRRMAQIDESRDTRPDLKASNMLRTKGIRTNQTKRIGNVPGVEVGDIFFFRMELCIVGLHAPTMSGIDYVSPKLTRDEEPLAVSIVSAGGYDDDGGDGDLLVYTGQGGVQRKDGKMFDQKLEGGNLALEKSVHRANEVRVIRGVKDVANPTGKIYIYDGLYKVQESWTEKSKSECNVFKYKLVRVPGQPEAFKVWKSIQQWKDGVASRVGVILPDLTSGAERQPVCLVNDVDDEKGPAYFTYIPTLKYSKPFIMPRPSPGCHCLDGCQSGDSNCPCIQRNEGFLPYSSLGVLMSYKTLIRECFSACSCPPDCRNRISQGGPKVRLEVFKTKNRGWGLRSLDPIRGGGFICEYAGEVIDVGNDKDDNYTFDATRIYEPLEAVHDYNDESRKVPFPLIISAKNGGNIARFMNHSCSPNVYWKLVVRESNNEAYFHIAFFAIRHIPPMQELTYDYGINKADRRRKQCLCGSLNCRRYFH

SEQ ID NO: 566 - protein, 1123 aa, Solanum bulbocastanum
  REGION 1..1123: note = Description of sequence: Solanum bulbocastanum peptide
MEQGFSSDSVPPAGPIDKSKVLDVKPLRCLVPVFPSPNGMASGTTPQPSPFVCVPPSGPFPPGVSPFYPFLSPNESGRSAENQDGLGFGTPISPVPLNSFRTPTANGDTGSRRPGRPRGSNGLAAEDDDSQNHSDQFGSGYSVHANDVEDTSTGKKRGRPRKTRLSQSGSGSGSGSGNPATPPIEVDVDPLLNQLLASFKLVEIDQVKKADGDKELAGRILLVYDLFRRRMTQIEERRGETPGSARRPDLKGANLLMTRGARTNQTKRVGNVPGVEVGDIFFFRMELCLVGLHAPSMAGIDYMSVRLTGDEEPIAVSIVSSGGYDDEGDDGDVLIYTGQGGVQRRDGQMFDQKLERGNLALEKSMHRGNEVRVIRGVLDVQNGGRGKIYIYDGLYRVQESWAEKSKLGNCSIFRYKLIRVPGQPEAFTLWKSVQQWREGTATRVGVILPDLTSGAESQPVCLVNDVDDEKGPAYFTYIPSLKYSKPFLKSNPSVGCQCLGGCQPGGTSCPCIQKNGGYLPFNPLGVLMSYKTLVHECGSACSCPPNCRNRISQAGPKARVEVFKTKNRGWGLRSWDPIRGGGFVCEYAGEVIEESRVGEFGNDGDDDYIFDATRMYEPLEAVRDYNDESKKVPYPLVISAKKGGNVARFMNHSCSPNVFWQLVVREINNETFYHVAFFAIRHIPPMQELTFDYGMKWSSLVNTISSRSVAEDRSSKVLDIWVKFSEVRFLLALHNFHRLRLVDDIKFLCGGRLIFGPDAASLYLSTFLIGAPALTFCIKMLFMIPKVSPIYGHVVLIVGLIITVLALSFLFMTSSSNPGIVPRNSRPPDLDEILNASSASMEWVGYAAPDVKLPRTKDIFINGHSVKVKFCDTCLLYRPPRASHCSICNNCVQRFDHHCPWVGQCIGVRNYRCFFLFITSTTTLCIYVFTFSLLNLLGQPGSVLHAMSTDVVSVVLICYCFIAVWFVGGLSVFHFYLMSTNQTTYENFRYRYEKKENPYSRGILKNLREILCSKVPVSLVNFREWVIEEDDASMRSMSMSHRFGSINSKGKFDLEMGGILGKDATFQVDYGGIDESLKKTRNDNANFDPLFFPDDQDAESTHSNEQRTVEDGRTEEDSNRGSS

SEQ ID NO: 567 - protein, 671 aa, Solanum bulbocastanum
  REGION 1..671: note = Description of sequence: Solanum bulbocastanum peptide
MEKGFGSDPSGSTIDKTRVLDVKPLRCLSPVFPSASEMSSITTPQPSPFVCITPTGPFPAGVTPIFPFLTPDESGRIGESSQQTPNRVPNQGTFGFGQPISPIPVNSFGNPTTNGNSGHVNNVGDSGSGKKKGGPKKPRKVPPENVVEVDVEPLLNQLLMSFKLVELDQAKKADGDKEVVRRILLVFDLFRRRMTQIDEPRYGAGSGRRPDLKASKMMMTKGMRTNQTKRIGNVPGIEVGDIFFFRMELCVVGLHAPTMSGIDYMSVKLTKDEEPLAVSIVSSGGYDDDGGDGDLLIYTGQGGVQRKDGQMFDQKLEKGNLALEKSVHRANDVRVIRGVKDVANPTGKIYIFDGLYKIQGSWEEKSKSGCNVFKYKLLRVPGQPEAFKVWKSIQQWRDGVVSRVGVILPDLTSGAESQAVCLVNDVDDEKGPAYFTYIPSLKYSKPFLTPRPSLGCQCLGGCQPDDTNCPCIQRNQGLLPYSSLGVLMTYKNLIHECGSACSCPPNCRNRMSQGGPKVRMEVFKTKNKGWGLRSWDPIRGGCFICEYAGEVSDLGYDRDDNYIFDATRIYEPLEPVHDYNDESRKVPFPLVISAKNGGNIARFMNHSCSPNVYWQLVVRESNNEAYYHIAFFAIRHIPPLQELTFDYGMDKADHRRKKCLCGSFKCRGYFY

SEQ ID NO: 568 - protein, 714 aa, Solanum chilense
  REGION 1..714: note = Description of sequence: Solanum chilense peptide
MEQGFGSDSVPPAGPIDKSKVLDVKPLRCLVPVFPSPNGMASGTTPQPSPFVCVPPSGPFPPGVSPFYPFLSPNESGRSAENQDGLGFGTPISPVPLNSFRTPTANGDTGPRRPGRPRASNGLAVEDDDSQNHSDQFGSGYSGHANDVEDTSTGKKRGRPRKTRLGQSSSGNPATPPIEVDVDPLLNQLLASFKLVEIDQVKKADGDKELSGRILLVYDLFRRRMTQIEERRGETPGSARRPDLKGANLLMTRGARTNQTKRIGNVPGVEVGDIFFFRMELCLVGLHAPSMAGIDYMSVRLTGDEEPIAVSIVSSGGYDDEGDDGEVLIYTGQGGVQRRDGQMFDQKLERGNLALEKSMHRGNEVRVIRGVVDVQNGGRGKIYMYDGLYRVQESWAEKSKLGNCSIFRYKLIRVPGQPEAFTLWKSVQQWREGTATRVGVILPDLTSGAESQPVCLVNDVDDEKGPAYFTYIPSLKYSKPFMKSNPSVGCQCLGGCQPGGTSCPCIQKNGGYLPFNPLGVLMSYKTLVHECGSACSCPPNCRNRITQAGPKARVEVFKTKNRGWGLRSWDPIRGGGFVCEYAGEVIEESRVGEFGNDGDDDYIFDATRMYEPLEAVRDYNDESKKVPYPLVISAKKGGNVARFMNHSCSPNVYWQLVVREINNETFYHVAFFAIRHIPPMQELTFDYGMVPPDKADRRRKKCLCGSLNCRGYFY

SEQ ID NO: 569 - protein, 671 aa, Solanum chilense
  REGION 1..671: note = Description of sequence: Solanum chilense peptide
MEQGFGSDPSGSTIDKTRVLDVKPLRCLSPVFPSASEMSSITTPQPSPFVCITPTGPFPSGVTPIFPFLSPDEPVRMGESSQQTPNQVPNQGTFGFGQPISPIPVNSFGNQTANGSSGHVNNVGDSGSGKKKGGPKKPRKVPPENVVEVDVEPLLNQLLMSFKLVDLDQAKKADGDKEVVRRILLVFDLFRRRMTQIDEPRYGAGSGRRPDLKASKMMMLKGMRTNQTKRIGNVPGIEVGDIFFFRMELCVVGLHAPTMSGIDYMSLKLTKDEEPLAVSIVSAGGYDDDGGDGDLLIYTGQGGVQRKDGQMFDQKLEKGNLALEKSVHRANDVRVIRGVKDVANPTGKIYIFDGLYKIQGSWEEKNKTGCNVFKYKLLRVPGQPEAFKVWKSIQQWRDGVVSRVGVILPDLTSGAESQAVCLVNDVDDEKGPAYFTYIPSLKYSKPFLTPRPSLGCQCIGGCQSDDTNCPCIQRNQGLLPYNSLGVLMTYKNLIHECGSACSCPPNCRNRMSQGGPKVRMEVFKTKNKGWGLRSWDPIRGGCFICEYAGEVRDIGYDRDDNYIFDATRIYEPLEAVHDYNDESRKVPFPLVISAKNGGNIARFMNHSCSPNVYWQLVVRESNNEAYYHIAFFAIRHIPPLQELTFDYGMDKADHRRKKCLCGSFKCRGYFY

SEQ ID NO: 570 - protein, 718 aa, Solanum commersonii
  REGION 1..718: note = Description of sequence: Solanum commersonii peptide
MEQGFGSDSVPPAGPIDKSKVLDVKPLRCLVPVFPSPNGMASGTTPQPSPFVCVPPSGPFPPGVSPFYPFLSPNESGRSAENQDGLGFGTPISPVPLNSFRTPTANGDTGSRRPGRPRASNGLSAEDDDSQNHSDQFGSGYSVHANEVEDTSTGKKRGRPRKTRLSQSGSGSGSGNPATPPIEVDIDPLLNQLLASFKLVEIDQVKKADGDKELAGRILLVYDLFRRRMTQIEERRGETPGSARRPDLKGANLLMTRGARTNQTKRIGNVPGVEVGDIFFFRMELCLVGLHAPSMAGIDYMSVRLTGDEEPIAVSIVSSGGYDDEGDDGDVLIYTGQGGVQRRDGQMFDQKLERGNLALEKSMHRGNEVRVIRGVLDVQNGGRGKIYMYDGLYRVQESWAEKSKLGNCSIFRYKLIRVPGQPEAFTLWKAVQQWREGTATRVGVILPDLTSGAESQPVCLVNDVDDEKGPAYFTYIPNLKYSKPFMKSNPSVGCQCLGGCQPGGTSCPCIQKNGGYLPFNPLGVLMSYKTLVHECGSACSCPPNCRNRISQAGPKARVEVFKTKNRGWGLRSWDPIRGGGFICEYAGEVIEESRVGEFGNDGDDDYIFDATRMYEPLEAVRDYNDESKKVPYPLVISAKKGGNVARFMNHSCSPNVFWQLVVREINNETFYHVAFFAIRHIPPMQELTFDYGMVPPDKADRRRKKCLCGSLNCRGYFY

SEQ ID NO: 571 - protein, 779 aa, Solanum commersonii
  REGION 1..779: note = Description of sequence: Solanum commersonii peptide
MEQGFGSDPSGSTIDKTRVLDVKPLRCLSPVFPSASEMSSITTPQPSPFVCITPTGPFPAGVTPIFPFLTPDESGRMGESSQQTPNRVPNQGTFGFGQPISPIPVNSFGNPTANGNSGHINNVGDSGSGKKKGGLKKPRKVPPENVVEVDVEPLLNQLLMSFKLVELDQAKKADGDKEVVRRILLVFDLFRRRMTQIDEPRYGAGSGRRPDLKASKMMMTKGMRTNQTKRIGNVPGIEVGDIFFFRMELCVVGLHAPTMSGIDYMSVKLTKDEEPLAVSIVSSGGYDDDGGDGDLLIYTGQGGVQRKDGQMFDQKLEKGNLALEKSVHRANDVRVIRGVKDVANPTGKIYIFDGLYKIQGSWEEKNKSGCNVFKYKLLRVPGQPEAFKVWKSIQQWRDGVVSRVGVILPDLTSGAESQAVCLVNDVDDEKGPAYFTYIPSLKYSKPFLTPRPSLGCQCLGGCQPDDTNCPCIQRNQGLLPYSSLGVLMTYKNLIHECGSACSCPPNCRNRMSQGGPKVRMEVFKTKNKGWGLRSWDPIRGGCFICEYAGEVSDLGYDRDDNYIFDATRIYEPLEAVHDYNDESRKVPFPLVISAKNGGNIARFMNHSCSPNVYWQLVVRESNNEAYYHIAFFAIRHIPPLQELTFDYGMDKADHRRKKCLCGSFKCRGLWSVTGKSTTRDCRLDGCHRFESSRGLIIMVLRKYNSSGVVTDIEALKRVFLFGGVAASTFTMLYYHYELNWLNQIVVFSPLNLSKTFHLDTPIKSSFNSTFQLLIKCFNH

SEQ ID NO: 572 - protein, 714 aa, Solanum dulcamara
  REGION 1..714: note = Description of sequence: Solanum dulcamara peptide
MEQGFGSDSVPPAGPIDKSKVLDIKPLRCLVPVFPSPNGMTSGTTPQPSPFVCVPPSGPFPPGVSPFYPFLSPNESGRSAENQDGLGFGTPISPVPLNSFRTPTANGDTGTRRPGRPRTTNGLAAEDDDSQNHSDQFGSGYSVHANDVEDTSTGKKRGRPRKTRLSQSGSGNAATPPIEVDIDPLLNQLLASFKLGEVDQVKKADGDKELAGRILLVYDLFRRRMTQIEERRGETPGSARRPDLKGANLLMTRGARTNQTKRIGNVPGVEVGDIFFFRMELCLVGLHAPSMAGIDYMSVRLTGDEEPIAVSIVSSGGYDDEGDDGEVLIYTGQGGVQRRDGQMFDQKLERGNLALEKSMHRGNEVRVIRGVIDVQNGGRGKIYMYDGLYRVQESWAEKSKLGNCSIFRYKLLRVPGQPEAFTLWKSVQQWRDGTATRVGVILPDLTSGAESQPVCLVNDVDDEKGPAYFTYIPSLKYSKPFMKSNPSVGCQCLGGCQPGGSSCPCIQKNGGYLPFNPLGVLMSYQTVVHECGSACSCPPNCRNRITQAGPKARVEVFKTKNRGWGLRSWDPIRGGGFVCEYAGEVIEESRVGEFGNDGDDDYIFDATRMYEPLEAVRDYNDESKKVPYPLVISAKKGGNVARFMNHSCSPNVYWQFVVREINNETYYHVAFFAIRHIPPMQELTFDYGMVPPDKADRRRKKCLCGSLNCRGYFY

SEQ ID NO: 573 - protein, 671 aa, Solanum dulcamara
  REGION 1..671: note = Description of sequence: Solanum dulcamara peptide
MEQGFGSDPSESTIDKTRVLDVKPLRCFSPVFPSANEMSSITTPQPSPFVCITPTGPFPDGVTPIFPFMAPNEPGRMGESSQQAPNRVPNQGTFGFGQPISPIPVNSFGNATANGNSVHVNNVEDSSAGRKKGGPKKPRKVQQGNVVEVNVEPLLNQLLMSFKLVDLDHAKKADGDKEEVRRILLVFDLFRRRMTQIDEPRYGAGSGRRPDLKASKMMMTKGIRTNQTKRIGNVPGIEIGDIFFFRMELCLVGLHAPTMSGIDYMSVKLTKDEEPLAVSIVSSGGYDDDGGDGDLLIYTGQGGVQRKDGQMFDQKLEKGNLALEKSMHRANEVRVIRGVKDVASPTGKIYIFDGLYKIQGSWEEKAKSGCNVFKYKLLRVPGQPEAFKVWKSIQQWRNGVVSRVGVILPDLTSGAESQPVCLVNDVDDEKGPAYFTYIPSLKYSKPFLTPRTSLGCQCLGGCQPDDSNCPCIQRNEGFLPYSSLGVLMSYKTLIYECGSACSCPPNCRNRMSQGGPKVRMEVFKTKNRGWGLRSWDPIRGGGFICEYAGEVSDVGNDRDDNYIFDATRIYEPLQAVHDYNDESRKVPFPLVINAKNGGNIARFMNHSCSPNVYWQLVVRESNNEVYYHIAFFAIRHIPPMQELTFDYGMDKADHRRKKCLCGSLKCRGFFY

SEQ ID NO: 574 - protein, 671 aa, Solanum lycopersicum
  REGION 1..671: note = Description of sequence: Solanum lycopersicum peptide
MEQGFGSDPSGSTIDKTRVLDVKPLRCLSPVFPSASEMSSITTPQPSPFLCITPTGPFPSGVTPIFPFLSPDEPVRMGESSQQTPNQVPNQGTFGFGQPISPIPVNSFGNQTANGSSGHVNNVGDSGSGKKKGGPKKPRKVPPENVVEVDVEPLLNQLLMSFKLVDLDQAKKADGDKEVVRRILLVFDLFRRRMTQIDEPRYGAGSGRRPDLKASKMMMLKGMRTNQTKRIGNVPGIEVGDIFFFRMELCVVGLHAPTMSGIDYMSLKLTKDEEPLAVSIVSAGGYDDDGGDGDLLIYTGQGGVQRKDGQMFDQKLEKGNLALEKSVHRANDVRVIRGVKDVANPTGKIYIFDGLYKIQGSWEEKIKTGCNVFKYKLLRVPGQPEAFKVWKSIQQWRDGVVSRVGVILPDLTSGAESQAVCLVNDVDDEKGPAYFTYIPSLKYSKPFLTPRPSLGCQCIGGCQPDDTNCPCIQRNQGLLPYNSLGVLMTYKNLIHECGSACSCPANCRNRMSQGGPKVRMEVFKTKNKGWGLRSWDPIRGGCFICEYAGEVRDIGYDRDDNYIFDATRIYEPLEAVHDYNDESRKVPFPLVISSKNGGNIARFMNHSCSPNVYWQLVVRESNNEAYYHIAFFAIRHIPPLQELTFDYGMDKADHRRKKCLCGSFKCRGYFY

SEQ ID NO: 575 - protein, 714 aa, Solanum pennellii
  REGION 1..714: note = Description of sequence: Solanum pennellii peptide
MEQGFGSDSVPPAGPIDKSKVLDVKPLRCLVPVFPSPNGMASGTTPQPSPFVCVPPSGPFPPGVSPFYPFLSPNESGRSAENQDGLGFGTPISPVPLNSFRTPTANGDTGPRRPGRPRASNGLAAEDDDSQNHSDQFGSGYSGHANDVEDTSTGKKRGRPRKTRLGQSSSGNPATPPIEVDVDPLLNQLLASFKLVEIDQVKKADGDKELSGRILLVYDLFRRRMTQIEERRGETPGSARRPDLKGANLLMTRGARTNQTKRIGNVPGVEVGDIFFFRMELCLVGLHAPSMAGIDYMSVRLTGDEEPIAVSIVSSGGYDDEGDDGEVLIYTGQGGVQRRDGQMFDQKLERGNLALEKSMHRGNEVRVIRGVVDVQNGGRGKIYMYDGLYRVQESWAEKSKLGNCSIFRYKLIRVPGQPEAFTLWKSVQQWREGTATRVGVILPDLTSGAESQPVCLVNDVDDEKGPAYFTYIPSLKYSKPFMKSNPSVGCQCLGGCQPGGTSCPCIQKNGGYLPFNPLGVLMSYKTLVHECGSACSCPPNCRNRITQAGPKARVEVFKTKNRGWGLRSWDPIRGGGFVCEYAGEVIEESRVGEFGNDGDDDYIFDATRMYEPLEAVRDYNDESKKVPYPLVISAKKGGNVARFMNHSCSPNVYWQLVVREINNETFYHVAFFAIRHIPPMQELTFDYGMVPPDKADRRRKKCLCGSLNCRGYFY

SEQ ID NO: 576 - protein, 671 aa, Solanum pennellii
  REGION 1..671: note = Description of sequence: Solanum pennellii peptide
MEQGFGSDPSGSTIDKTRVLDVKPLRCLSPVFPSASEMSSITTPQPSPFVCITPTGPFPSGVTPIFPFLSPDEPVRMGESSQQTPNQVPNQGTFGFGQPISPIPVNSFGNQTANGSSGHVNNVGDSGSGKKKGGPKKPRKVPPENVVEVDVEPLLNQLLMSFKLVDLDQAKKADGDKEVVRRILLVFDLFRRRMTQIDEPRYGAGSGRRPDLKASKMMMLKGMRTNQTKRIGNVPGIEVGDIFFFRMELCVVGLHAPTMSGIDYMSLKLTKDEEPLAVSIVSAGGYDDDGGDGDLLIYTGQGGVQRKDGQMFDQKLEKGNLALEKSVHRANDVRVIRGVKDVANPTGKIYIFDGLYKIQGSWEEKNKTGCNVFKYKLLRVPGQPEAFKVWKSIQQWRDGVVSRVGVILPDLTSGAESQAVCLVNDVDDEKGPAYFTYIPSLKYSKPFLTPRPSLGCQCIGGCQPDDTNCPCIQRNQCLLPYSSLGVLMTYKNLIHECGSACSCPPNCRNRMSQGGPKVRMEVFKTKNKGWGLRSWDPIRGGCFICEYAGEVRDIGYDRDDNYIFDATRIYEPLEAVHDYNDESRKVPFPLVISAKNGGNIARFMNHSCSPNVYWQLVVRESNNEAYYHIAFFATRHIPPLQELTFDYGMDKADHRRKKCLCGSFKCRGYFY

SEQ ID NO: 577 - protein, 720 aa, Solanum pinnatisectum
  REGION 1..720: note = Description of sequence: Solanum pinnatisectum peptide
MEQGFGSDSVPPAGPIDKSKVLDVKPLRCLVPVFPSPNGMASGTTPQPSPFVCVPPSGPFPPGVSPFYPFLSPNESGRSAENQDGLGYGMPISPVPLNSFRTPTANGDTGSRRPGRPRGSNGLAAEDDDSQNHSDQFGSGYSVHANDVEDTSTGKKRGRPRKTRLSQSGSGSGSGSGNPATPPIEVDIDPLLNQLLASFKLVEIDQVKKADGDKELAGRILLVYDLFRRRMTQIEERRGETPGSARRPDLKGANLLMTRGVRTNQTKRVGNVPGVEVGDIFFFRMELCLVGLHAPSMAGIDYMSVRLTGDEEPIAVSIVSSGGYDDEGDDGDVLIYTGQGGVQRRDGQMFDQKLERGNLALEKSMHRGNEVRVIRGVLDVQNGGRGKIYIYDGLYRVQESWAEKSKLGNCSIFRYKLIRVPGQPEAFTLWKSVQQWREGTATRVGVILPDLTSGAESQPVCLVNDVDDEKGPAYFTYIPSLKYSKPFMKSNPSVGCQCLGGCQPGGTSCPCIQKNGGYLPFNPLGVLMSYKTLVHECGSACSCPPNCRNRISQAGPKARVEVFKTKNRGWGLRSWDPIRGGGFVCEYAGEVIEESRVGEFGNDGDDDYIFDATRMYEPLEAVRDYNDEAKKVPYPLVISAKKGGNVARFMNHSCSPNVFWQLVVREINNETFYHVAFFTIRHIPPMQELTFDYGMVPPDKADRRRKKCLCGSLNCRGYFY

SEQ ID NO: 578 - protein, 688 aa, Solanum pinnatisectum
  REGION 1..688: note = Description of sequence: Solanum pinnatisectum peptide
MEQGFGSDSVPPAGPIDKSKVLDVKPLRCLVPVFPSPNGMASGTTPQPSPFVCVPPSGPFPPGVSPFYPFLSPNESGRSAENQDGLGFGTPISPVPLNSFRTPTANGDTGSRRPGRPRGSNGLAAEDDDSQNHSDQFGSGYSVHANDVEDTSTGKKRGRPRKTRLSQSGSGSGNPATPPIEVDIDPLLNQLLASFKLVEIDQVKKADGDKELAGRILLVYDLFRRRMTQIEERRGETPGSARRPDLKGANLLMTRGVRTNQTKRVGNVPGVEVGDIFFFRMELCLVGLHAPSMAGIDYMSVRLTGDEEPIAVSIVSSGGYDDEGDDGDVLIYTGQGGVQRRDGQMFDQKLERGNLALEKSMHRGNEVRVIRGVLDVQNGGRGKIYIYDGLYRVQESWAEKSKLGNCSIFRYKLIRVPGQPEAFTLWKSVQQWREGTATRVGVILPDLTSGAESQPVCLVNDVDDEKGPAYFTYIPSLKYSKPFMKSNPSVGCQCLGGCQPGGTSCPCIQKNGGYLPFNPLGVLMSYKTLVHECGSACSCLQTAKSDLSSGFVCEYAGEVIEESRVGEFGNDGDDDYIFDATRMYEPLEAVRDYNDEAKKVPYPLVISAKKGGNVARFMNHSCSPNVFWQLVVREINNETFYHVAFFTIRHIPPMQELTFDYGMVPPDKADRRRKKCLCGSLNCRGYFY

SEQ ID NO: 579 - protein, 671 aa, Solanum pinnatisectum
  REGION 1..671: note = Description of sequence: Solanum pinnatisectum peptide
MEQGFGSDPSGSTIDKARVLDVKPLRCLSPVFPSASEMSSITTPQPSPFVCITPTGPFPDGVTPIFPFLTPDESGRMGESSQQTPNRVPNQGTFGFGQLISPIPVNSFGNPTTNGNSGHVNNVGDSGSGKKKGGPKKPRKVPPENVVEVDVEPLLNQLLMSFKLVELDQAKKADGDKEVVRRILLVFDLFRRRMTQIDEPRYGAGSGRRPDLKASKMMMTKGMRTNQTKRIGNVPGIEVGDIFFFRMELCVVGLHAPTMSGIDYMSVKLTKDEEPLAVSIVSSGGYDDDGGDGDLLIYTGQGGVQRKDGQMFDQKLEKGNLALEKSVHRANDVRVIRGVKDVANPTGKIYIFDGLYKIQGSWEEKSKSGCNVFKYKLLRVPGQPEAFKVWKSIQQWRDGVVSRVGVILPDLTSGAESQAVCLVNDVDDEKGPAYFTYIPSLKYSKPFLTPRPSLGCQCLGGCQPDDTNCPCIQRNQGLLPYSSLGVLMTYKNLIHECGSACSCPPNCRNRMSQGGPKVRMEVFKTKNKGWGLRSWDPIRGGCFICEYAGEVSDLGYDRDDNYIFDATRIYEPLEAVHDYNDESRKVPFPLVISAKNGGNIARFMNHSCSPNVYWQLVVRESNNEAYYHIAFFAIRHIPPLQELTFDYGMDKADHRRKKCLCGSFKCRGYFY

SEQ ID NO: 580 - protein, 718 aa, Solanum sp.
  REGION 1..718: note = Description of sequence: Solanum stenotomum peptide
MEQGFGSDSVPPAGPIDKSKVLDVKPLRCLVPVFPSPNGMASGTTPQPSPFVCVPPSGPFPPGVSPFYPFLSPNESGRSAENQDGLGFGTPISPVPLNSFRTPTANGDTGSRRPGRPRGSNGLAAEDDDSQNHSDQFGSGYSVHGNDVEDTSTGKKRGRPRKTRLSQSGSGSGSGNPATPPIEVDIDPLLNQLLASFKLVEIDQVKKADGDKELAGRILLVYDLFRRRMTQIEERRGETPGSARRPDLKGANLLMTRGARTNQTKRIGNVPGVEVGDIFFFRMELCLVGLHAPSMAGIDYMSVRLTGDEEPIAVSIVSSGGYDDEGDDGDVLIYTGQGGVQRRDGQMFDQKLERGNLALEKSMHRGNEVRVIRGVLDVQNGGRGKIYIYDGLYRVQESWAEKSKLGNCSIFRYKLIRVPGQPEAFTLWKSVQQWREGTATRVGVILPDLTSGAESQPVCLVNDVDDEKGPAYFTYIPSLKYSKPFMKSNPSVGCQCLGGCQPGGTSCPCIQKNGGYLPFNPLGVLMSYKTLVYECGSACSCPPNCRNRISQAGPKARVEVFKTKNRGWGLRSWDPIRGGGFVCEYAGEVIEESRVGEFGNDGDDDYIFDATRMYEPLEAVRDYNDESKKVPYPLVISAKKGGNVARFMNHSCSPNVFWQLVVREINNETFYHVAFFAIRHIPPMQELTFDYGMVPPDKADRRRKKCLCGSLNCRGYFY

SEQ ID NO: 581 - protein, 671 aa, Solanum sp.
  REGION 1..671: note = Description of sequence: Solanum stenotomum peptide
MEQGFGSDPSGSTIDKTRVLNVKPLRCLSPVFPSASEMSSIMTPQPSPFVCITPTGPFPAGVTPIFPFLTPDESGRMGESSQQTPNRVPNQGTFGFGQPISPIPVNSFGNPTANGNSGHVNSAGDTGSGKKKGGPKKPRKVPPENVVEVDVEPLLNQLLMSFKLVELDQAKKADGDKEVVRRILLVFDLFRRRMTQIDEPRYGAGSGRRPDLKASKMMMTKGMRTNQTKRIGNVPGIEVGDIFFFRMELCVVGLHAPTMSGIDYMSVKLTKDEEPLAVSIVSSGGYDDDGGDGDLLIYTGQGGVQRKDGQMFDQKLEKGNLALEKSVHRANDVRVIRGVKDVANPTGKIYIFDGLYKIQGSWEEKSKSGCNVFKYKLLRVPGQPEAFKVWKSIQQWRDGVVSRVGVILPDLTSGAESQAVCLVNDVDDEKGPAYFTYIPSLKYSKPFLTPRPSLGCQCLGGCQPDDTNCPCIQRNQGLLPYSSLGVLMTYKNLIHECGSACSCPPNCRNRMSQGGPKVRMEVFKTKNKGWGLRSWDPIRGGCFICEYAGEVSDLGYDRDDNYIFDATRIYEPLEAVHDYNDESRKVPFPLVISAKNGGNIARFMNHSCSPNVYWQLVVRESNNEAYYHIAFFAIRHIPPLQELTFDYGMDQADHRRKKCLCGAFKCRGYFY

SEQ ID NO: 582 - protein, 718 aa, Solanum tuberosum
  REGION 1..718: note = Description of sequence: Solanum tuberosum peptide
MEQGFGTDSVPPAGPIDKSKVLDVKPLRCLVPVFPSPNGMASGTTPQPSPFVCVPPSGPFPPGVSPFYPFLSPNESGRSAENQDGLGFGTPISPVPLNSFRTPTANGDTGPRRPGRPRASNGLAAEDDDSQNHSDQFGSGYSVHANDVEDTSTGKKRGRPRKTRLSQSGSGSGSGNPATPPIEVDIDPLLNQLLASFKLVEIDQVKKADGDKELAGRILLVYDLFRRRMTQIEERRGETPGSARRPDLKGANLLMTRGARTNQTKRIGNVPGVEVGDIFFFRMELCLVGLHAPSMAGIDYMSVRLTGDEEPIAVSIVSSGGYDDEGDDGDVLIYTGQGGVQRRDGQMFDQKLERGNLALEKSMHRGNEVRVIRGVLDVQNGGRGKIYMYDGLYRVQESWAEKSKLGNCSIFRYKLIRVPGQPEAFTLWKSVQQWREGTATRVGVILPDLTSGAESQPVCLVNDVDDEKGPAYFTYIPSLKYSKPFMKSNPSVGCQCLGGCQPGGTSCPCIQKNGGYLPFNPLGVLMSYKTLVHECGSACSCPPNCRNRISQAGPKARVEVFKTKNRGWGLRSWDPIRGGGFVCEYAGEVIEESRVGEFGNDGDDDYIFDATRMYEPLEAVRDYNDESKKVPYPLVISAKKGGNVARFMNHSCSPNVFWQLVVREINNETFYHVAFFAIRHIPPMQELTFDYGMVPPDKADRRRKKCLCGSLNCRGYFY

SEQ ID NO: 583 - protein, 718 aa, Solanum tuberosum
  REGION 1..718: note = Description of sequence: Solanum tuberosum peptide
MEQGFGTDSVPPAGPIDKSKVLDVKPLRCLVPVFPSPNGMASGTTPQPSPFVCVPPSGPFPPGVSPFYPFLSPNESGRSAENQDGLGFGTPISPVPLNSFRTPTANGDTGPRRPGRPRASNGLAAEDDDSQNHSDQFGSGYSVHANDVEDTSTGKKRGRPRKTRLSQSGSGSGSGNPATPPIEVDIDPLLNQLLAAFKLVEIDQVKKADGDKELAGRILLVYDLFRRRMTQIEERRGETPGSARRPDLKGANLLMTRGARTNQTKRIGNVPGVEVGDIFFFRMELCLVGLHAPSMAGIDYMSVRLTGDEEPIAVSIVSSGGYDDEGDDGDVLIYTGQGGVQRRDGQMFDQKLERGNLALEKSMHRGNEVRVIRGVLDVQNGGRGKIYMYDGLYRVQESWAEKSKLGNCSIFRYKLIRVPGQPEAFTLWKSVQQWREGTATRVGVILPDLTSGAESQPVCLVNDVDDEKGPAYFTYIPSLKYSKPFMKSNPSVGCQCLGGCQPGGTSCPCIQKNGGYLPFNPLGVLMSYKTLVHECGSACSCPPNCRNRISQAGPKARVEVFKTKNRGWGLRSWDPIRGGGFVCEYAGEVIEESRVGEFGNDGDDDYIFDATRMYEPLEAVRDYNDESKKVPYPLVISAKKGGNVARFMNHSCSPNVFWQLVVREINNETFYHVAFFAIRHIPPMQELTFDYGMVPPDKADRRRKKCLCGSLNCRGYFY

SEQ ID NO: 584 - protein, 671 aa, Solanum tuberosum
  REGION 1..671: note = Description of sequence: Solanum tuberosum peptide
MEQGFGSDPSGSTIDKTRVLDVKPLRCLSPVFPSASEMSSITTPQPSPFVCITPTGPFPAGVTPIFPFLTPDESGRMGESSQQTPNRMPNQGTFGFGQPISPIPVNSFGNPITNGNSGHVNNVGDSGSGKKKGGPKKPRKVPPENVVEVDVEPLLNQLLMSFKLVELDQAKKADGDKEVVRRILLVFDLFRRRMTQIDEPRYGAGSGRRPDLKASKMMMTKGMRTNQTKRIGNVPGIEVGDIFFFRMELCVVGLHAPTMSGIDYMSVKLTKDEEPLAVSIVSSGGYDDDGGDGDLLIYTGQGGVQRKDGQMFDQKLEKGNLALEKSVHRANDVRVIRGVKDVANPTGKIYIFDGLYKIQGSWEEKNKSGCNVFKYKLLRVPGQPEAFKVWKSIQQWRDGVVSRVGVILPDLTSGAESQAVCLVNDVDDEKGPAYFTYIPSLKYSKPFLTPRPSLGCQCLGGCQPDDTNCPCIQRNQGLLPYSSLGVLMTYKNLIHECGSACSCPPNCRNRMSQGGPKVRMEVFKTKNKGWGLRSWDPIRGGCFICEYAGEVSDLGYDRDDNYIFDATRIYEPLEAVHDYNDESRKVPFPLVISAKNGGNIARFMNHSCSPNVYWQLVVRESNNEAYYHIAFFAIRHIPPLQELTFDYGMDKADHRRKKCLCGSFKCRGYFY

SEQ ID NO: 585 - protein, 671 aa, Solanum tuberosum
  REGION 1..671: note = Description of sequence: Solanum tuberosum peptide
MEQGFGSDPSGSTIDKTRVLDVKPLRCLSPVFPSASEMSSITTPQPSPFVCITPTGPFPAGVTPIFPFLTPDESGRMGESSQQTPNRMPNQGTFGFGQPISPIPVNSFGNPITNGNSGHVNNVGDSGSGKKKGGPKKPRKVPPENVVEVDVEPLLNQLLMSFKLVELDQAKKADGDKEVVRRILLVFDLFRRRMTQIDEPRYGAGSGRRPDLKASKMMMTKGMRTNQTKRIGNVPGIEVGDIFFFRMELCVVGLHAPTMSGIDYMSVKLTKDEEPLAVSIVSSGGYDDDGGDGDLLIYTGQGGVQRKDGQMFDQKLEKGNLALEKSVHRANDVRVIRGVKDVANPTGKIYIFDGLYKIQGSWEEKNKSGCNVFKYKLLRVPGQPEAFKVWRSIQQWRDGVVSRVGVILPDLTSGAESQAVCLVNDVDDEKGPAYFTYIPSLKYSKPFLTPRPSLGCQCLGGCQPDDTNCPCIQRNQGLLPYSSLGVLMTYKNLIHECGSACSCPPNCRNRMSQGGPKVRMEVFKTKNKGWGLRSWDPIRGGCFICEYAGEVSDLGYDRDDNYIFDATRIYEPLEAVHDYNDESRKVPFPLVISAKNGGNIARFMNHSCSPNVYWQLVVRESNNEAYYHIAFFAIRHIPPLQELTFDYGMDKADHRRKKCLCGSFKCRGYFY

SEQ ID NO: 586 - protein, 671 aa, Solanum tuberosum
  REGION 1..671: note = Description of sequence: Solanum tuberosum peptide
MEQGFGSDPSGSTIDKTRVLDVKPLRCLSPVFPSASEMSSIMTPQPSPFVCITPTGPFPAGVTPIFPFLTPDESGRMGESNQQTPNQVPNQGTFGFGQPISPIPVNSFGNPITNGNSGHANNVGDSGSGKKKGGPKKPRKVPPENVVEVDVEPLLNQLLMSFKLVELDQAKKADGDKEVVRRILLVFDLFRRRMTQIDEPRYGAGSGRRPDLKASKMMMTKGMRTNQTKRIGNVPGIEVGDIFFFRMELCVVGLHAPTMSGIDYMSVKLTKDEEPLAVSIVSSGGYDDDGGDGDLLIYTGQGGVQRKDGQMFDQKLEKGNLALEKSVHRANDVRVIRGVKDVANPTGKIYIFDGLYKIQGSWEEKSKSGCNVFKYKLLRVPGQPEAFKVWKSIQQWRDGVVSRVGVILPDLTSGAESQAVCLVNDVDDEKGPAYFTYIPSLKYSKPFLTPRPSLGCQCLGGCQPDDTNCPCIQRNQGLLPYSSLGVLMTYKNLIYECGSACSCPPNCRNRMSQGGPKVRMEVFKTKNKGWGLRSWDPIRGGCFICEYAGEVSDLGYDRDDNYIFDATRIYEPLEAVHDYNDESRKVPFPLVISAKNGGNIARFMNHSCSSNVYWQLVVRESNNEAYYHIAFFAIRHIPPLQELTFDYGMDKADHRRKKCLCGSFKCRGYFY

SEQ ID NO: 587 - protein, 718 aa, Solanum verrucosum
  REGION 1..718: note = Description of sequence: Solanum verrucosum peptide
MEQGFGSDSVPPAGPIDKSKVLNVKPLRCLVPVFPSPNGMASGTTPQPSPFVCVPPSGPFPPGVSPFYPFLSPNESGRSAENQDGLGFGTPISPVPLNSFRTPTANGDTGSRRPGRPRGSNGLAAEDDDSQNHSDQFGSGYSVHANDVEDTSTGKKRGRPRKTRLSQSGSGSGSGNPATPPIEVDIDPLLNQLLASFKLVEIDQVKKADGDKELAGRILLVYDLFRRRMTQIEERRGETPGSARRPDLKGANLLMTRGARTNQTKRIGNVPGVEVGDIFFFRMELCLVGLHAPSMAGIDYMSVRLTGDEEPIAVSIVSSGGYDDEGDDGDVLIYTGQGGVQRRDGQMFDQKLERGNLALEKSMHRGNEVRVIRGVLDVQNGGRGKIYIYDGLYRVQESWAEKSKLGNCSIFRYKLIRVPGQPEAFTLWKSVQQWREGTATRVGVILPDLTSGAESQPVCLVNDVDDEKGPAYFTYIPSLKYSKPFMKSNPSVGCQCLGGCQPGGTSCPCIQKNGGYLPFNPLGVLMSYKTLVYECGSACSCPPNCRNRISQAGPKARVEVFKTKNRGWGLRSWDPIRGGGFVCEYAGEVIEESRVGEFGNDGDDDYIFDATRMYEPLEAVRDYNDESKKVPYPLVISAKKGGNVARFMNHSCSPNVFWQLVVREINNETFYHVAFFAIRHIPPMQELTFDYGMVPPDKADRRRKKCLCGSLNCRGYFY

SEQ ID NO: 588 - protein, 671 aa, Solanum verrucosum
  REGION 1..671: note = Description of sequence: Solanum verrucosum peptide
MEQGFGSDPSGSTIDKTRVLDVKPLRCLSPVFPSASEMSSIMTPQPSPFVCITPTGPFPAGVTPIFPFLTPDESGRMGESSQQTPNQVPNQGTFGFGQPISPIPVNSFGNPTANGNSGHVNNAGDTGSGKKKGGPKKPRKVPPENVVEVDVEPLLNQLLMSFKLVELDQAKKADGDKEVVRRILLVFDLFRRRMTQIDEPRYGAGSGRRPDLKASKMMMTKGMRTNQTKRIGNVPGIEVGDIFFFRMELCVVGLHAPTMSGIDYMSVKLTKDEEPLAVSIVSSGGYDDDGGDGDLLIYTGQGGVQRKDGQMFDQKLEKGNLALEKSVHRANDVRVIRGVKDVANPTGKIYIFDGLYKIQGSWEEKNKSGCNVFKYKLLRVPGQPEAFKVWKSIQQWRDGVVSRVGVILPDLTSGAESQAVCLVNDVDDEKGPAYFTYIPSLKYSKPFLTPRPSLGCQCLGGCQPDDTNCPCIQRNQGLLPYSSLGVLMTYKNLIHECGSACSCPPNCRNRMSQGGPKVRMEVFKTKNKGWGLRSWDPIRGGCFICEYAGEVSDLGYDRDDNYIFDATRIYEPLEPVHDYSDESRKVPFPLVISAKNGGNIGRFMNHSCSPNVYWQLVVRESNNEAYYHIAFFAIRHIPPLQELTFDYGMDKADHRRKKCLCGSFKCRGYFY

SEQ ID NO: 589 - protein, 714 aa, Solanum lycopersicum
  REGION 1..714: note = Description of sequence: Solanum lycopersicum peptide
MEQGFGSDSVPPAGPIDKSKVLDVKPLRCLVPVFPSPNGMASGTTPQPSPFVCVPPSGPFPPGVSPFYPFLSPNESGRSAENQDGLGFGTPISPVPLNSFRTPAANGDTGPRRPGRPRASNGLAAEDDDSQNHSDQFGSGYSGHANDVEDTSTGKKRGRPRKTRLGQPSSGNPATPPIEVDVDPLLNQLLASFKLVEIDQVKKADGDKELSGRILLVYDLFRRRMTQIEERRGETPGSARRPDLKGANLLMTRGARTNQTKRIGNVPGVEVGDIFFFRMELCLVGLHAPSMAGIDYMSVRLTGDEEPIAVSIVSSGGYDDEGDDGEVLIYTGQGGVQRRDGQMFDQKLERGNLALEKSMHRGNEVRVIRGVVDVQNGGRGKIYMYDGLYRVQESWAEKSKLGNCSIFRYKLIRVPGQPEAYTLWKSVQQWREGTATRVGVILPDLTSGAESQPVCLVNDVDDEKGPAYFTYIPSLKYSKPFMKSNPSVGCQCLGGCQPGGTSCPCIQKNGGYLPFNPLGVLMSYKTLVYECGSACSCPPNCRNRITQAGPKARVEVFKTKNRGWGLRSWDPIRGGGFVCEYAGEVIEESRVGEFGNDGDDDYIFDATRMYEPLEAVRDYNDESKKVPYPLVISAKKGGNVARFMNHSCSPNVYWQLVVREINNETFYHVAFFAIRHIPPMQELTFDYGMVPPDKADRRRKKCLCGSLNCRGYFY

SEQ ID NO: 590 - DNA, 23 bp, synthetic construct
  misc_feature 1..23: note = Description of sequence: Primer: Forward primer sequence used for amplifying NtHAP1a DNA region harboring gRNA1 target
  source 1..23: mol_type = other DNA
cgtagccattcttgagcagaaag

SEQ ID NO: 591 - DNA, 22 bp, synthetic construct
  misc_feature 1..22: note = Description of sequence: Primer: Reverse primer sequence used for amplifying NtHAP1a DNA region harboring gRNA1 target
  source 1..22: mol_type = other DNA
acctgatcttccggatccattt

SEQ ID NO: 592 - DNA, 25 bp, synthetic construct
  misc_feature 1..25: note = Description of sequence: Primer: Forward primer sequence used for amplifying NtHAP1b DNA region harboring gRNA1 target
  source 1..25: mol_type = other DNA
acatagccattcttgagcaatacat

SEQ ID NO: 593 - DNA, 18 bp, synthetic construct
  misc_feature 1..18: note = Description of sequence: Primer: Reverse primer sequence used for amplifying NtHAP1b DNA region harboring gRNA1 target
  source 1..18: mol_type = other DNA
gatcttgcggccgcattc

SEQ ID NO: 594 - DNA, 20 bp, synthetic construct
  misc_feature 1..20: note = Description of sequence: Primer: Forward primer sequence used for amplifying NtHAP1 DNA region harboring gRNA2 target
  source 1..20: mol_type = other DNA
acccgcatgtatgagccatt

SEQ ID NO: 595 - DNA, 22 bp, synthetic construct
  misc_feature 1..22: note = Description of sequence: Primer: Reverse primer sequence used for amplifying NtHAP1 DNA region harboring gRNA2 target
  source 1..22: mol_type = other DNA
aagtcaattcttgcatgggagg

SEQ ID NO: 596 - DNA, 21 bp, synthetic construct
  misc_feature 1..21: note = Description of sequence: Primer: Forward primer sequence used for amplifying NtHAP1a DNA region harboring gRNA3 target
  source 1..21: mol_type = other DNA
catttttggccccaaatggat

SEQ ID NO: 597 - DNA, 23 bp, synthetic construct
  misc_feature 1..23: note = Description of sequence: Primer: Reverse primer sequence used for amplifying NtHAP1a DNA region harboring gRNA3 target
  source 1..23: mol_type = other DNA
cagctttcttaacctgatcgaca

SEQ ID NO: 598 - DNA, 20 bp, synthetic construct
  misc_feature 1..20: note = Description of sequence: Primer: Forward primer sequence used for amplifying NtHAP1 DNA region harboring gRNA4 or gRNA6 target
  source 1..20: mol_type = other DNA
ggcagcttgttgtacgtgaa

SEQ ID NO: 599 - DNA, 22 bp, synthetic construct
  misc_feature 1..22: note = Description of sequence: Primer: Reverse primer sequence used for amplifying NtHAP1 DNA region harboring gRNA4 or gRNA6 target
  source 1..22: mol_type = other DNA
ccaaaccttgattcagtggtga

SEQ ID NO: 600 - DNA, 20 bp, synthetic construct
  misc_feature 1..20: note = Description of sequence: Primer: Forward primer sequence used for amplifying NtHAP1b DNA region harboring gRNA5 target
  source 1..20: mol_type = other DNA
catttttggccccgaatgcg

SEQ ID NO: 601 - DNA, 24 bp, synthetic construct
  misc_feature 1..24: note = Description of sequence: Primer: Reverse primer sequence used for amplifying NtHAP1b DNA region harboring gRNA5 target
  source 1..24: mol_type = other DNA
tcagctttcttagcttgatcgaac

SEQ ID NO: 602 - DNA, 23 bp, synthetic construct
  misc_feature 1..23: note = Description of sequence: Primer: Forward primer sequence used for amplifying NtHAP2 DNA region harboring gRNA7 target
  source 1..23: mol_type = other DNA
tgctttgtgttggtaggtcaatg

SEQ ID NO: 603 - DNA, 20 bp, synthetic construct
  misc_feature 1..20: note = Description of sequence: Primer: Reverse primer sequence used for amplifying NtHAP2 DNA region harboring gRNA7 target
  source 1..20: mol_type = other DNA
ccagtgggaggaacacagac

SEQ ID NO: 604 - DNA, 22 bp, synthetic construct
  misc_feature 1..22: note = Description of sequence: Primer: Forward primer sequence used for amplifying NtHAP2 DNA region harboring gRNA8 target
  source 1..22: mol_type = other DNA
gaaagtcccttttcccctggtc

SEQ ID NO: 605 - DNA, 24 bp, synthetic construct
  misc_feature 1..24: note = Description of sequence: Primer: Reverse primer sequence used for amplifying NtHAP2 DNA region harboring gRNA8 target
  source 1..24: mol_type = other DNA
ttgtgactaggaaactccctttgc

SEQ ID NO: 606 - DNA, 21 bp, synthetic construct
  misc_feature 1..21: note = Description of sequence: Primer: Forward primer sequence used for RT-PCR or qPCR on NtHAP1a transcript
  source 1..21: mol_type = other DNA
gggtggagttcagagacgaga

SEQ ID NO: 607 - DNA, 20 bp, synthetic construct
  misc_feature 1..20: note = Description of sequence: Primer: Reverse primer sequence used for RT-PCR or qPCR on NtHAP1a transcript
  source 1..20: mol_type = other DNA
cgccaacacattgacaaccc

SEQ ID NO: 608 - DNA, 21 bp, synthetic construct
  misc_feature 1..21: note = Description of sequence: Primer: Forward primer sequence used for RT-PCR or qPCR on NtHAP1b transcript
  source 1..21: mol_type = other DNA
gcggcaatgaggtgagagtaa

SEQ ID NO: 609 - DNA, 24 bp, synthetic construct
  misc_feature 1..24: note = Description of sequence: Primer: Reverse primer sequence used for RT-PCR or qPCR on NtHAP1b transcript
  source 1..24: mol_type = other DNA
ccaacacattgacaacccatagac

SEQ ID NO: 610 - DNA, 20 bp, synthetic construct
  misc_feature 1..20: note = Description of sequence: Primer: Forward primer sequence used for RT-PCR or qPCR on NtHAP2 transcript
  source 1..20: mol_type = other DNA
gtcgcatatccaaccgggaa

SEQ ID NO: 611 - DNA, 20 bp, synthetic construct
  misc_feature 1..20: note = Description of sequence: Primer: Reverse primer sequence used for RT-PCR or qPCR on NtHAP2 transcript
  source 1..20: mol_type = other DNA
tgacaactcggagagggtct

SEQ ID NO: 612 - DNA, 2115 bp, synthetic construct
  misc_feature 1..2115: note = Description of sequence: Coding sequence, Named: NtHAP3
  source 1..2115: mol_type = other DNA
atggaacaaggtttgcgttctgatggtaataatcctccgagcatcgataagactagggttttggatgtgaagcctttgagatgtcttgcacctgtttttccatccccaaatggaatgtcttctgtttcaactccacagccctcaccttttgtctgtgttcctcccactggtccgttcccacccggggttgctccattttacccttttgtggctccaaatgattcgggaaggccaggtgaaagtagtcaacaaactccaagtggggtgccgaatcagggcggcccttttggttttgcgcagcctatatctcccgttcctttaaactcgttcagaactccaacaactgcgaatggaaatagtgggaggtcaaggagggctgtagacgatgatgattacagtaattcacaggatcagaatgaccaatttgccagtggatttagtgtgcacgtgaataatgttgaagattcaggtactggaaaaaaaaggggaagaccgaaaaagcctcggagagctcagcaggctgaggggttgacccctgtggaagtggatgttgaacctttgttgactcagttgctcacgtcttttaaacttgttgacttggatcaggtcaagaaagctgatggtgacaaggagctagcggggagggtactgttggtttttgatttgttcagaagaaggatgactcaaattgacgaatcgagggatgggcccggttctggtagaagaccagacctaaaagcttctaatatgctgatgacaaagggagttcggacaaaccaaacaaagaggattggaaatgcacccgggattgaagttggtgacatcttcttcttcaggatggaattgtgcctagtgggattgcatgcaccaactatggctggcatagattatatgagtgtcaaactaacaatggacgaagaacctcttgcggtcagcatagtgtcctctggaggatatgatgatgatggaggtgatggcgatgtattaatttacactggccagggtggagtccagaggaaagacgggcaagtgtttgatcagaaacttgagaggggaaaccttgctttggaaaagagtgtgcatcgagccaatgaagtaagagtaattaggggtgttaaggatgtcgcatatccaacggggaagatctatatttacgacggactttataagattcaggaatcatgggcagagaaaaacaaggtgggctgcaatgtatttaagtataaacttctgagagtccctgggcagcctgaagcatttaaagtatggaagtcaattcagcaatggaaagatggcgtggcatcacgtgttggagtcatcctaccggacctgacgtctggtgcagaaagtcaacccgtttgtcttgttaatgatgtagatgacgagaaaggacctgcctatttcacatatattcctagtttgaagtactcaaaaccttttgtaatgcctagaccctctccgagttgtcactgcgttggtgggtgccaacctggtgactccaattgcgcttgtattcagagtaatggaggctttttgccttatagttcacttggagttcttttgagttacaaaaccttgatacatgagtgtggttcggcctgttcatgccctcctaattgccgaaatcgaatgtctcaaggaggtcctaaagctcgtttggaggtcttcaagacgaaaaatagaggttggggactcagatcttgggatcctatacgtggaggtggtttcatttgtgaatatgctggagaagtcatagacgctggtaattacagtgacgacaattacatatttgatgcaacccgtatatatgcgcctttggaagccgaacgtgattataatgatgagtctcggaaagtcccttttcccctggtcataagtgccaagaatggtggaaatatttctcgctttatgaaccatagttgttcacctaatgtttactggcagcttgttgtacgacaaagtaacaatgaagcaacctaccatatcgcctttttcgccattagacacattcctcccatgcaagagttgacctttgattatggtatggacaaagcagatcataggagaaagaagtgcttatgtggctcgttgaactgtagaggttatttttactag